(19) United States
(12) Patent Application Publication
(10) Pub. No.: US 2026/0071211 A1
(43) Pub. Date: Mar. 12, 2026

(54) Genome Editing Compositions and Methods for Treatment of Friedreich's Ataxia

(71) Applicant: Prime Medicine, Inc., Cambridge, MA (US)

(72) Inventors: Tyler HARVEY, Cambridge, MA (US); Yu ZHENG, Cambridge, MA (US); Peter CHEN, Cambridge, MA (US); Ekaterina Alexeevna KOSHELEVA, Cambridge, MA (US); Julia HEFFERNAN, Cambridge, MA (US); Liana FASCHING, Cambridge, MA (US)

(21) Appl. No.: 18/707,049

(22) PCT Filed: Nov. 4, 2022
(86) PCT No.: PCT/US2022/049057

§ 371 Date: May 2, 2024

Related U.S. Application Data
(60) Provisional application No. 63/276,124, filed on Nov. 5, 2021.

(51) Int. Cl. C12N 15/11; A61K 48/00; C12N 9/12; C12N 9/22; C12N 15/90

(52) U.S. Cl. CPC C12N 15/11; C12N 9/1276; C12N 9/226; C12N 15/907; C12Y 207/07049; A61K 48/00; C12N 2310/20; C12N 2310/315; C12N 2310/321

(57) ABSTRACT

Provided herein are prime editing methods and compositions for treatment of genetic disorders such as Friedreich ataxia.

### CROSS REFERENCE TO RELATED APPLICATIONS

[0001] The present application claims priority to and the benefit of U.S. Provisional Application No. 63/276,124, filed Nov. 5, 2021, the contents of which are herein incorporated by reference in their entirety.

### BACKGROUND

[0002] The present invention describes dual prime editing as a genome editing approach for treating genetic diseases, for example, the repeat expansion disorder Friedreich's ataxia (FRDA).

[0003] FRDA is a disorder with neuro- and cardio-degenerative progression. It represents the most frequent type of inherited ataxia. Patients typically show degeneration of large sensory neurons of the dorsal root ganglia, of Betz pyramidal neurons of the cerebral cortex and lateral cortico-spinal and spinocerebellar tracts, as well as lesions in the dentate nucleus of the cerebellum. In addition, non-neurological degeneration causes hypertrophic cardiomyopathy and increased incidence of diabetes mellitus. Neurodegenerative motor symptoms typically appear before adolescence with progressive gait instability and loss of coordination, while the cardiac component of the disease causes premature mortality at a mean age of 40 years.

[0004] This monogenic disease is caused by the hyper-expansion of naturally occurring GAA repeats in the first intron of the FXN gene, encoding frataxin, a protein implicated in the biogenesis of iron-sulfur clusters. About 98% of mutant alleles have an expansion of a GAA trinucleotide repeat in intron 1 of the FXN gene. This leads to reduced levels of the protein frataxin.

[0005] Frataxin is produced in insufficient amounts in diseased individuals as a consequence of the epigenetic silencing of the gene triggered by a GAA trinucleotide repeat expansion in the first intron of the gene. As the genetic defect interferes with FXN transcription, FRDA patients express a normal frataxin protein but at insufficient levels. Thus, current therapeutic strategies are mostly aimed at restoring physiological FXN expression.

[0006] FRDA is an autosomal recessive disorder. Almost all FRDA patients carry an intronic expansion of GAA repeats located in intron 1 on both copies of the FXN gene, although the number of GAA repeats in each FXN gene may be different from each other.

[0007] Longer hyper-expansions of the GAA trinucleotide repeat result in a more severe phenotype with an earlier onset and faster progression. GAA repeat expansions impair FXN transcription by inducing the formation of triple helical DNA structures (sticky DNA), persistent DNA/RNA hybrids (R-loops), and specific epigenetic modifications. The FXN gene encodes for the precursor of frataxin, a small iron-binding protein that is mainly, but not exclusively, confined inside the mitochondrial matrix, where it is converted into the functional mature form. Although its primary function is still debated, mature frataxin is a key component of the Iron-Sulfur Cluster (ISC) biosynthetic apparatus that functions as an essential cofactor to all ISC-dependent enzymes of the cell. As consequence of insufficient FXN expression, defective ISC biosynthesis triggers a series of vicious cycles leading to deregulated intracellular iron homeostasis, impaired mitochondrial electron transport chain and higher sensitivity to trigger oxidant- and stress-induced cell death. Lack of normal levels of frataxin also may lead to increased levels of iron in the mitochondria.

[0008] In the normal version of the FAN gene, the GAA trinucleotide repeat is between 7 and 22 times, but can be up to ˜40 triplets in unaffected individuals. In FRDA patients with a defective FXN gene, the GAA repeats can be from 70 to 1700. FRDA symptom severity, age of onset, and rate of disease progression may be related to the number of GAA copies in affected individuals.

### SUMMARY

[0009] Provided herein are prime editing guide RNAs (PEgRNAs), prime editing compositions, and methods for editing and/or excising a GAA repeat expansion in a FXN gene. In an aspect, provided herein is a prime editing composition that comprises (A) a first prime editing guide RNA (PEgRNA) or one or more polynucleotides encoding the first PEgRNA and (B) a second PEgRNA or one or more polynucleotides encoding the second PEgRNA, wherein the first PEgRNA comprises (i) a first spacer that is complementary to a first search target sequence on a first strand of a FXN gene, (ii) a first gRNA core capable of binding to a Cas9 protein; and (iii) a first extension arm comprising a first editing template and a first primer binding site (PBS), wherein the first spacer comprises at its 3′ end nucleotides 4-20 of a sequence selected from the group consisting of SEQ ID NOs: 1, 101, 234, 331, 362, 391, 422, and 452, and wherein the first PBS comprises at its 5′ end a sequence that is the reverse complement of nucleotides 13-17 of the selected sequence, wherein the second PEgRNA comprises (i) a second spacer that is complementary to a second search target sequence on a second strand of the FXN gene complementary to the first strand, (ii) a second gRNA core capable of binding to a Cas9 protein; and (iii) a second extension arm comprising a second editing template and a second PBS, wherein the second spacer comprises at its 3′ end nucleotides 4-20 of a sequence selected from the group consisting of SEQ ID NOs: 482, 511, 542, 571, 600, 631, 740, 767, 796, 823, 852, 881, 910, 937, 966, 990, 1017, 1132, 1159, 1186, 1215, 1324, 1351, 1380, 1405, 1430, 1455, 1480, 1505, 1528, 1553, 1578, 1603, 1628, 1653, 1678, 1703, 1728, 1753, 1777, 1802, 1827, 1848, 1873, 1898, 1923, and 1947, and wherein the second PBS comprises at its 5′ end a sequence that is the reverse complement of nucleotides 13-17 of the selected sequence, and wherein: (a) the first editing template comprises a region of complementarity to the second editing template; (b) the first editing template comprises nucleotides 8-17 of the selected sequence for the second spacer, and the second editing template comprises nucleotides 8-17 of the selected sequence for the first spacer; or (c) the first editing template comprises nucleotides 8-17 of the selected sequence for the second spacer, and a region of complementarity to the second editing template, and the second editing template comprises nucleotides 8-17 of the selected sequence for the first spacer, and a region of complementarity to the first editing template.

[0010] In certain embodiments, the first spacer is SEQ ID NO: 1, 101, or 234.

[0011] In certain embodiments, the selected sequence for the second spacer is SEQ ID NO: 631, 1017, or 1215.

[0012] In certain embodiments, the selected sequence for the first spacer is SEQ ID NO: 101.

[0013] In certain embodiments, the selected sequence for the second spacer is SEQ ID NO: 1017.

[0014] In certain embodiments, the first spacer and/or the second spacer is from 16 to 22 nucleotides in length.

[0015] In certain embodiments, the first spacer and/or the second spacer is 20 nucleotides in length and comprises the selected sequence.

[0016] In certain embodiments, the first gRNA core and the second gRNA core comprises the same sequence.

[0017] In certain embodiments, the first gRNA core and the second gRNA core each comprise SEQ ID NO: 2260.

[0018] In certain embodiments, the editing composition has a first gRNA core and a second gRNA core each comprises SEQ ID NO: 2259.

[0019] In certain embodiments, the first spacer, the first gRNA core, the first editing template, and the first PBS form a contiguous sequence in a single molecule.

[0020] In certain embodiments, the first PEgRNA comprises from 5′ to 3′ the first spacer, the first gRNA core, the first editing template, and the first PBS.

[0021] In certain embodiments, the second spacer, the second gRNA core, the second editing template, and the second PBS form a contiguous sequence in a single molecule.

[0022] In certain embodiments, the second pegRNA comprises from 5′ to 3′ the second spacer, the second gRNA core, the second editing template, and the second PBS.

[0023] In certain embodiments, the first PBS is at least 8 nucleotides in length and comprises at its 5′ end a sequence that is the reverse complement of nucleotides 10-17 of the selected sequence for the first spacer.

[0024] In certain embodiments, the first PBS is 8-17 nucleotides in length and comprises at its 5′ end a sequence that is the reverse complement of nucleotides 10-17, 9-17, 8-17, 7-17, 6-17, 5-17, 4-17, 3-17, 2-17, or 1-17 of the selected sequence for the first spacer.

[0025] In certain embodiments, the first PBS is 8-16 nucleotides in length and comprises at its 5′ end a sequence that is the reverse complement of nucleotides 10-17, 9-17, 8-17, 7-17, 6-17, 5-17, 4-17, 3-17, or 2-17 of the selected sequence for the first spacer.

[0026] In certain embodiments, the first PBS is 10-12 nucleotides in length and comprises at its 5′ end a sequence that is the reverse complement of nucleotides 8-17, 7-17, or 6-17 of the selected sequence for the first spacer.

[0027] In certain embodiments, the second PBS is at least 8 nucleotides in length and comprises at its 5′ end a sequence that is the reverse complement of nucleotides 10-17 of the selected sequence for the second spacer.

[0028] In certain embodiments, the second PBS is 8-17 nucleotides in length and comprises at its 5′ end a sequence that is the reverse complement of nucleotides 10-17, 9-17, 8-17, 7-17, 6-17, 5-17, 4-17, 3-17, 2-17, or 1-17 of the selected sequence for the second spacer.

[0029] In certain embodiments, the second PBS is 8-16 nucleotides in length and comprises at its 5′ end a sequence that is the reverse complement of nucleotides 10-17, 9-17, 8-17, 7-17, 6-17, 5-17, 4-17, 3-17, or 2-17 of the selected sequence for the second spacer.

[0030] In certain embodiments, the second PBS is 10-12 nucleotides in length and comprises at its 5′ end a sequence that is the reverse complement of nucleotides 8-17, 7-17, or 6-17 of the selected sequence for the first spacer.

[0031] In certain embodiments, the first spacer comprises SEQ ID NO: 1, and the first PBS comprises SEQ ID NO: 12 or 14, the first spacer comprises SEQ ID NO: 101, and the first PBS comprises SEQ ID NO: 112 or 114, or the first spacer comprises SEQ ID NO: 234, and the first PBS comprises SEQ ID NO: 245 or 247, and the second spacer comprises SEQ ID NO: 631, and the second PBS comprises SEQ ID NO: 642 or 644, the second spacer comprises SEQ ID NO: 1017, and the second PBS comprises SEQ ID NO: 1028 or 1030; or the second spacer comprises SEQ ID NO: 1215, and the second PBS comprises SEQ ID NO: 1226 or 1228.

[0032] In certain embodiments, the first editing template comprises a region of complementarity to the second editing template.

[0033] In certain embodiments, the region of complementarity is about 15 to about 38 nucleotides in length.

[0034] In certain embodiments, the region of complementarity is about 18 to about 38 nucleotides in length

[0035] In certain embodiments, the first and/or the second editing template is about 15 to about 93 nucleotides in length.

[0036] In certain embodiments, the GC content of the region of complementarity is at least about 27%.

[0037] In certain embodiments, the GC content of the region of complementarity is about 30% to about 85%

[0038] In certain embodiments, the GC content of the region of complementarity is about 40% to about 70%.

[0039] In certain embodiments, the GC content of the region of complementarity is about 63% to about 70%.

[0040] In certain embodiments, the first editing template comprises nucleotides 1 to x of SEQ ID NO: a, wherein x is an integer from 10 to i, wherein i is the length of SEQ ID NO: a; wherein the second editing template comprises nucleotides 1 to y of SEQ ID NO: b, wherein y is an integer from (i+10−x) to i; wherein a is an integer from 1972 to 1991 or from 2401 to 2414, and wherein b is an integer that equals (a+99).

[0041] In certain embodiments, the second editing template comprises nucleotides 1 to x of SEQ ID NO: a, wherein x is an integer from 10 to i, wherein i is the length of SEQ ID NO: a; wherein the first editing template comprises nucleotides 1 to y of SEQ ID NO: b, wherein y is an integer from (i+10−x) to i; wherein a is an integer from 1972 to 1991 or from 2401 to 2414, and wherein b is an integer that equals (a+99).

[0042] In certain embodiments, x is an integer from 15 to i. In certain embodiments, x is an integer from 17 to i. In certain embodiments, x is an integer from 17 to i, from 19 to i, from 20 to i, from 27 to i, from 28 to i, or from 29 to i. In certain embodiments, x equals y equals i.

[0043] In certain embodiments, a is 1972. In certain embodiments, a is 1979, 1982, 1985, 1986, or 1991.

[0044] In certain embodiments, the first PEgRNA comprises a sequence selected from the group consisting of SEQ ID NOs: 22-25, 66-100, 122-125, 202-233, 255-258, and 299-330, and wherein the second PEgRNA comprises a sequence selected from the group consisting of SEQ ID NOs: 652-655, 708-739, 1038-1041, 1094-1131, 1236-1239, and 1292-1323.

[0045] In certain embodiments, the first PEgRNA comprises a sequence selected from the group consisting of SEQ ID NOs 122-125 and 218-233, and wherein the second PEgRNA comprises a sequence selected from the group consisting of SEQ ID NOs 652-655 and 724-739.

[0046] In certain embodiments, the first PEgRNA comprises a sequence selected from the group consisting of SEQ ID NOs SEQ ID NOs 122-125 and 218-233, and wherein the second PEgRNA comprises a sequence selected from the group consisting of SEQ ID NOs 1038-1041, 1098, and 1101.

[0047] In certain embodiments, the first PEgRNA comprises a sequence selected from the group consisting of SEQ ID NOs SEQ ID NOs 122-125 and 218-233, and wherein the second PEgRNA comprises a sequence selected from the group consisting of SEQ ID NOs 1236-1239 and 1308-1321.

[0048] In certain embodiments, the first PEgRNA comprises a sequence selected from the group consisting of SEQ ID NOs 22-25, and 98-100, and wherein the second PEgRNA comprises a sequence selected from the group consisting of SEQ ID NOs 652-655 and 724-739.

[0049] In certain embodiments, the first PEgRNA comprises a sequence selected from the group consisting of SEQ ID NOs 22-25, and 98-100, and wherein the second PEgRNA comprises a sequence selected from the group consisting of SEQ ID NOs 1038-1041, 1098, and 1101.

[0050] In certain embodiments, the first PEgRNA comprises a sequence selected from the group consisting of SEQ ID NOs 22-25, and 98-100, and wherein the second PEgRNA comprises a sequence selected from the group consisting of SEQ ID NOs 1236-1239 and 1308-1321.

[0051] In certain embodiments, the first PEgRNA comprises a sequence selected from the group consisting of SEQ ID NOs 255-258, and 315-330, and wherein the second PEgRNA comprises a sequence selected from the group consisting of SEQ ID NOs 652-655 and 724-739.

[0052] In certain embodiments, the first PEgRNA comprises a sequence selected from the group consisting of SEQ ID NOs 255-258, and 315-330, and wherein the second PEgRNA comprises a sequence selected from the group consisting of SEQ ID NOs 1038-1041, 1098, and 1101.

[0053] In certain embodiments, the first PEgRNA comprises a sequence selected from the group consisting of SEQ ID NOs 255-258, and 315-330, and wherein the second PEgRNA comprises a sequence selected from the group consisting of SEQ ID NOs 1236-1239 and 1308-1321.

[0054] In certain embodiments, the first editing template comprises at its 3′ end nucleotides 8-17 of the selected sequence for the second spacer, and wherein the second editing template comprises at its 3′ end nucleotides 8-17 of the selected sequence of the first spacer.

[0055] In certain embodiments, the first editing template comprises at its 3′ end nucleotides 1-17, 2-17, 3-17, 4-17, 5-17, 6-17, 7-17, or 8-17 of the selected sequence for the second spacer, and/or wherein the second editing template comprises at its 3′ end nucleotides 1-17, 2-17, 3-17, 4-17, 5-17, 6-17, 7-17, or 8-17 of the selected sequence for the first spacer.

[0056] In certain embodiments, the first editing template comprises at its 3′ end nucleotides 3-17 of the selected sequence for the second spacer, and wherein the second editing template comprises at its 3′ end nucleotides 3-17 of the selected sequence of the first spacer.

[0057] In certain embodiments, the first editing template comprises a region of complementarity to a sequence on the second strand of the FXN gene that is directly downstream of nucleotide 3 of the second search target sequence, wherein the region of complementarity is about 20 to 30 nucleotides in length.

[0058] In certain embodiments, the region of complementarity is about 20, about 25, or about 30 nucleotides in length.

[0059] In certain embodiments, the second editing template comprises a region of complementarity to a sequence on the first strand of the FXN gene that is directly downstream to nucleotide 3 of the first search target sequence, wherein the region of complementarity is about 20 to 30 nucleotides in length.

[0060] In certain embodiments, the region of complementarity is about 20, about 25, or about 30 nucleotides in length.

[0061] In certain embodiments, the first editing template comprises a sequence selected from the group consisting of SEQ ID NOs: 2170-2172, wherein the selected sequence for the second spacer is SEQ ID NO: 631, optionally wherein the second spacer comprises at its 3′ end SEQ ID NO: 631.

[0062] In certain embodiments, the first editing template comprises a sequence selected from the group consisting of SEQ ID NOs: 2173-2175, wherein the selected sequence for the second spacer is SEQ ID NO: 1017, optionally wherein the second spacer comprises at its 3′ end SEQ ID NO: 1017.

[0063] In certain embodiments, the first editing template comprises a sequence selected from the group consisting of SEQ ID NOs: 2176-2178, wherein the selected sequence for the second spacer is SEQ ID NO: 1215, optionally wherein the second spacer comprises at its 3′ end SEQ ID NO: 1215.

[0064] In certain embodiments, the second editing template comprises a sequence selected from the group consisting of SEQ ID NOs: 2179-2181, wherein the first spacer comprises at its 3′ end nucleotides 5-20 of SEQ ID NO: 101, optionally wherein the first spacer comprises at its 3′ end SEQ ID NO: 101.

[0065] In certain embodiments, the first PEgRNA comprises a sequence selected from the group consisting of SEQ ID NOs: 166-177, and wherein the second PEgRNA comprises a sequence selected from the group consisting of SEQ ID NOs: 696-707.

[0066] In certain embodiments, the first PEgRNA comprises a sequence selected from the group consisting of SEQ ID NOs: 178-189, and wherein the second PEgRNA comprises a sequence selected from the group consisting of SEQ ID NOs: 1082-1093.

[0067] In certain embodiments, the first PEgRNA comprises a sequence selected from the group consisting of SEQ ID NOs: 190-201, and wherein the second PEgRNA comprises a sequence selected from the group consisting of SEQ ID NOs: 1280-1291.

[0068] In certain embodiments, the first editing template comprises from 5′ to 3′ (i) a region of complementarity to the second editing template and (ii) nucleotides 8-17 of the selected sequence for the second spacer; and wherein the second editing template comprises from 5′ to 3′ (i) a region of complementarity to the first editing template and (ii) nucleotides 8-17 of the selected sequence for the first spacer.

[0069] In certain embodiments, the first editing template comprises nucleotides 1-17, 2-17, 3-17, 4-17, 5-17, 6-17, 7-17, or 8-17 of the selected sequence for the second spacer, and/or wherein the second editing template comprises 1-17, 2-17, 3-17, 4-17, 5-17, 6-17, 7-17, or 8-17 of the selected sequence for the first spacer.

[0070] In certain embodiments, the first editing template comprises nucleotides 3-17 of the selected sequence for the second spacer, and wherein the second editing template comprises nucleotides 3-17 of the selected sequence of the first spacer.

[0071] In certain embodiments, the first editing template comprises a region of complementarity to a sequence on the second strand of the FXN gene that is directly downstream to nucleotide 3 of the second search target sequence, wherein the region of complementarity is about 20 to 30 nucleotides in length.

[0072] In certain embodiments, the second editing template comprises a region of complementarity to a sequence on the first strand of the FXN gene that is directly downstream to nucleotide 3 of the first search target sequence, wherein the region of complementarity is about 20 to 30 nucleotides in length.

[0073] In certain embodiments, the region of complementarity between the first editing template and the second editing template is about 15 to about 38 nucleotides in length.

[0074] In certain embodiments, the region of complementarity between the first editing template and the second editing template is about 15 to about 93 nucleotides in length.

[0075] In certain embodiments, the first PEgRNA and/or the second PEgRNA further comprises a 3′ motif, optionally wherein the 3′ motif is connected to the 3′ end of the PEgRNA via a linker.

[0076] In certain embodiments, the 3′ motif comprises the sequence of SEQ ID NO: 2237.

[0077] In certain embodiments, the first PEgRNA and/or the second PEgRNA further comprises 5′mN*mN*mN* and 3′ mN*mN*mN*N modifications, where m indicates that the nucleotide contains a 2′-O-Me modification and a * indicates the presence of a phosphorothioate bond.

[0078] In certain embodiments, the prime editing composition further comprises a prime editor or one or more polynucleotides encoding the prime editor, wherein the prime editor comprises (i) a Cas9 nickase having a nuclease inactivating mutation in the HNH domain and (ii) a reverse transcriptase.

[0079] In certain embodiments, the Cas9 nickase comprises an amino acid sequence having at least 80%, 85%, 90%, 95%, 96%, 97%, 98%, 99%, or 100% identity to SEQ ID NO: 2288.

[0080] In certain embodiments, the reverse transcriptase comprises an amino acid sequence having at least 80%, 85%, 90%, 95%, 96%, 97%, 98%, 99%, or 100% identity to SEQ ID NO: 2283.

[0081] In certain embodiments, the sequence identities are determined by Needleman-Wunsch alignment of two protein sequences with Gap Costs set to Existence: 11 Extension: 1 where percent identity is calculated by dividing the number of identities by the length of the alignment.

[0082] In certain embodiments, the prime editor is a fusion protein.

[0083] In certain embodiments, the fusion protein comprises SEQ ID NO: 2343 or 2344.

[0084] In certain embodiments, the one or more polynucleotides encoding the prime editor comprises (a) a first sequence encoding an N-terminal portion of the Cas9 nickase and an intein-N and (b) a second sequence encoding an intein-C, a C-terminal portion of the Cas9 nickase, and the reverse transcriptase.

[0085] In some embodiments, the prime editing composition comprises one or more vectors that comprises the one or more polynucleotides encoding the first PEgRNA, the one or more polynucleotides encoding the second PEgRNA, and the one or more polynucleotides encoding the prime editor.

[0086] In certain embodiments, the one or more vectors are AAV vectors. In one aspect, provided herein is a population of viral particles collectively comprising the one or more polynucleotides encoding the prime editing composition of the disclosure or any one of the aspects or embodiments herein. In some embodiments, the viral particles are AAV particles.

[0087] In an aspect, provided here in is an LNP comprising the prime editing composition of the disclosure or any one of the aspects or embodiments herein. In some embodiments, the LNP comprises the first and the second PEgRNA, one or more polynucleotide encoding the Cas9 nickase, and one or more polynucleotides encoding the reverse transcriptase. In some embodiments, the polynucleotide encoding the Cas9 nickase and the polynucleotide encoding the reverse transcriptase are mRNA. In some embodiments, the polynucleotide encoding the Cas9 nickase and the polynucleotide encoding the reverse transcriptase are the same molecule.

[0088] In an aspect, provided herein is a pharmaceutical composition comprising the prime editing composition or the LNP of the disclosure or any one of the aspects or embodiments herein and a pharmaceutically acceptable excipient as discussed herein.

[0089] In an aspect, provided herein is a method of editing a FXN gene, the method comprising contacting the FXN gene with (a) the prime editing composition of the disclosure or any one of the aspects or embodiments herein and a prime editor comprising a Cas9 nickase having a nuclease inactivation mutation in the HNH domain and a reverse transcriptase, (b) the prime editing composition of the disclosure or any one of the aspects or embodiments herein, or (c) the LNP of the disclosure or any one of the aspects or embodiments herein. In certain embodiments, the FXN gene is in a cell. In certain embodiments, the cell is a mammalian cell. In certain embodiments, the cell is a human cell. In certain embodiments, the cell is a fibroblast, a myoblast, a neural stem cell, a neural progenitor cell, a neuron, a dorsal root ganglion cell, a cardiac progenitor cell, a cardiomyocyte, a retinal progenitor cell, or a retinal ganglion neuron. In certain embodiments, the cell is in a subject. In certain embodiments, the subject is a human. In certain embodiments, the cell is from a subject having Friedreich's Ataxia. In certain embodiments, a cell can be generated by the methods discussed herein. In certain embodiments, a population of cells can generated by the methods discussed herein.

[0090] In an aspect, provided herein is a method of treating Friedreich's Ataxia in a subject in need thereof, the method comprising administering to the subject (a) the prime editing composition of the disclosure or any one of the aspects or embodiments herein and a prime editor comprising a Cas9 nickase having a nuclease inactivation mutation in the HNH domain and a reverse transcriptase, (b) the prime editing composition of the disclosure or any one of the aspects or embodiments herein, (c) the LNP of the disclosure or any one of the aspects or embodiments herein, or (d) the pharmaceutical compositions or any one of the aspects or embodiments described herein.

[0091] Other aspects, embodiments, and features will be apparent from the following description, the drawings, and the claims.

### INCORPORATION BY REFERENCE

[0092] All publications, patents, and patent applications mentioned in this specification are herein incorporated by reference to the same extent as if each individual publication, patent, or patent application was specifically and individually indicated to be incorporated by reference.

### BRIEF DESCRIPTION OF THE DRAWINGS

[0093] The novel features of the invention are set forth with particularity in the appended claims. A better understanding of the features and advantages of the present invention will be obtained by reference to the following detailed description that sets forth illustrative embodiments, in which the principles of the invention are utilized, and the accompanying figures of which:

[0094] FIG. 1 depicts a schematic of a prime editing guide RNA (PEgRNA) binding to a double-stranded target DNA sequence.

[0095] FIG. 2 depicts a PEgRNA architectural overview in an exemplary schematic of PEgRNA designed for a prime editor.

[0096] FIG. 3 is a schematic showing the spacer and gRNA core part of an exemplary guide RNA, in two separate molecules. The rest of the PEgRNA structure is not shown.

[0097] FIG. 4A depicts an exemplary schematic of a dual prime editing system for editing both strands of a double-stranded target DNA. Same color/shading indicates complementarity or identity between sequences.

[0098] FIG. 4B depicts an exemplary schematic of dual prime editing with a replacement duplex (RD) comprising an overlap duplex (OD). Same color/shading indicates complementarity or identity between sequences.

[0099] FIG. 4C depicts an exemplary schematic of dual prime editing. Same color/shading indicates complementarity or identity between sequences.

[0100] FIG. 4D depicts an exemplary schematic of dual prime editing. Same color/shading indicates complementarity or identity between sequences.

[0101] FIG. 4E depicts an exemplary schematic of dual prime editing. Same color/shading indicates complementarity or identity between sequences.

[0102] FIG. 4F depicts an exemplary schematic of dual prime editing. Same color/shading indicates complementarity or identity between sequences.

[0103] FIG. 4G depicts an exemplary schematic of dual prime editing. Same color/shading indicates complementarity or identity between sequences.

[0104] FIG. 5 shows axonal growth and frataxin expression in healthy iDRGs and iDRGs derived from Friedreich's Ataxia patient iPSCs. FIGS. 5A and 5D demonstrate axonal growth in healthy iDRGs compared to that in iDRG derived from patient cell line #1, with axonal growth focused view at the lower left corners. FIGS. 5C and 5F illustrate frataxin protein staining in healthy iDRGs and reduced frataxin level in patient cell derived iDRGs. FIGS. 5B and 5E show DAPI imaging as a reference.

[0105] FIG. 6 shows Frataxin expression in healthy iDRGs, iDRGs derived from Freidreich's Ataxia patient iPSCs, and iDRGs derived from prime edited patient iPSCs. FIG. 6A-D shows Frataxin staining images in the upper row. FIG. 6E-H show DAPI reference images in the lower row).

[0106] FIG. 7 shows axonal growth in healthy iDRGs, iDRGs derived from Freidreich's Ataxia patient iPSCs, and iDRGs derived from prime edited patient iPSCs. FIG.

[0107] FIG. 7A shows an image of frataxin labeling (expression) from healthy iDRGs.

[0108] FIG. 7B show an image of frataxin labeling (expression) from FRDA patient iPSC-derived iDRGs.

[0109] FIG. 7C show an image of frataxin labeling (expression) in FRDA patient iPSC-derived dual prime edited iDRGs (clone 2).

[0110] FIG. 7D shows an image of frataxin labeling (expression) in FRDA patient iPSC-derived dual prime edited iDRGs (clone 1).

### DETAILED DESCRIPTION

[0111] Provided herein, in some embodiments, are compositions and methods to edit the target gene FAN with dual prime editing. In certain embodiments, provided herein are compositions and methods for correction of mutations in the (FXN) gene associated with Friedreich ataxia. Compositions provided herein can comprise prime editors (PEs) that may use engineered guide polynucleotides, e.g., prime editing guide RNAs (PEgRNAs), that can direct PEs to specific DNA targets and can encode DNA edits on the target gene FXN that serve a variety of functions, including direct correction of disease-causing mutations. The human FXN locus contains normally from 10 to 66 GAA-triplet repeats within the first intron, whereas FRDA individuals have a hyper-expansion of such repeats, up to 1700 triplets. Four classes of alleles are recognized for the GAA repeat sequence in intron 1 of FXN). In general, the four classes of alleles are as follows:
[0112] Normal alleles: 5-33 GAA repeats. More than 80%-85% of alleles contain fewer than 12 repeats (referred to as short normal) and approximately 15% have 12-33 repeats (long normal). Normal alleles with more than 27 GAA repeats are rare.
[0113] Mutable normal (premutation) alleles: 34-65 GAA repeats. Although the exact frequency of these alleles has not been formally determined, they likely account for fewer than 1% of FXN alleles.
[0114] Full-penetrance (disease-causing expanded) alleles: 66 to approximately 1,300 GAA repeats. The majority of expanded alleles contain between 600 and 1,200 GAA repeats In 96% of cases, the mutant FXN gene has 90-1,300 GAA trinucleotide repeat expansions in intron 1 of both alleles.
[0115] Borderline alleles: 44-66 GAA repeats. The shortest repeat length associated with disease (i.e., the exact demarcation between normal and full-penetrance alleles) has not been clearly determined).

[0116] The following description and examples illustrate embodiments of the present disclosure in detail. It is to be understood that this disclosure is not limited to the particular embodiments described herein and as such can vary. Those of skill in the art will recognize that there are numerous variations and modifications of this disclosure, which are encompassed within its scope. Although various features of the present disclosure can be described in the context of a single embodiment, the features can also be provided separately or in any suitable combination. Conversely, although the present disclosure can be described herein in the context of separate embodiments for clarity, the present disclosure can also be implemented in a single embodiment.

### Definitions

[0117] This disclosure refers to position numbers in polynucleotides. Unless otherwise noted, nucleotide x, in a polynucleotide sequence, refers to the nucleotide at position number x in the polynucleotide sequence from a 5′ to 3′ order.

[0118] Unless defined otherwise, all technical and scientific terms used herein have the same meaning as is commonly understood by one of ordinary skill in the art.

[0119] The terminology used herein is for the purpose of describing particular embodiments only and is not intended to be limiting. As used herein, the singular forms “a”, “an” and “the” are intended to include the plural forms as well, unless the context clearly indicates otherwise. Furthermore, to the extent that the terms “including”, “includes”, “having”, “has”, “with”, or variants thereof are used herein, they mean “comprising”.

[0120] Unless otherwise specified, the words “comprising”, “comprise”, “comprises”, “having”, “have”, “has”, “including”, “includes”, “include”, “containing”, “contains” and “contain” are inclusive or open-ended and do not exclude additional, unrecited elements or method steps.

[0121] Reference to “some embodiments”, “an embodiment”, “one embodiment”, or “other embodiments” means that a particular feature or characteristic described in connection with the embodiments is included in at least one or more embodiments, but not necessarily all embodiments, of the present disclosure.

[0122] The term “about” or “approximately” in relation to a numerical means, a range of values that fall within 10% greater than or less than the value. For example, about x means x±(10%*x).

[0123] The term “between” when used with reference to a range of numbers, means the range of numbers including the first and the last number in the range.

[0124] As used herein, a “cell” can generally refer to a biological cell. A cell can be the basic structural, functional and/or biological unit of a living organism. A cell can originate from any organism having one or more cells. Some non-limiting examples include: a prokaryotic cell, eukaryotic cell, a bacterial cell, an archaeal cell, a cell of a single-cell eukaryotic organism, a protozoa cell, a cell from a plant, an animal cell, a cell from an invertebrate animal (e.g., fruit fly, cnidarian, echinoderm, nematode), a cell from a vertebrate animal (e.g., fish, amphibian, reptile, bird, mammal), a cell from a mammal (e.g., a pig, a cow, a goat, a sheep, a rodent, a rat, a mouse, a non-human primate, and a human). Sometimes a cell may not originate from a natural organism (e.g., a cell can be synthetically made, sometimes termed an artificial cell).

[0125] As used herein, an “FRDA relevant cell” is a type of cell that is involved mechanisms of FRDA pathogenesis and therapeutic strategies for FRDA. FRDA relevant cells can include for example: stem cells; pluripotent cells; embryonic stem cells; induced pluripotent stem cells (iPSCs); multi-lineage stem cells; neural stem cells, neural progenitor cells; fibroblasts, myoblasts, radial glial cells/glial progenitor cells (GPSs), including astrocyte-biased glial progenitor cells, oligodendrocyte-biased glial progenitor cells, and unbiased glial progenitor cells; glial cells; neurons, including sensory neurons, dorsal root ganglion cells, spinal motor neurons, medium spiny neurons, cortical neurons, and striatal neurons; astrocytes; oligodendrocytes; blood cells; cardiac cells; cardiomyocytes, cardiomyocyte progenitor cells (CMPCs); retinal progenitor cells, retinal cells, retinal ganglion neuron; smooth muscle cells; smooth muscle progenitor cells; human stem cells; human pluripotent cells; human embryonic stem cells; human iPSCs; human multi-lineage stem cells; human neural stem cells; human radial glial cells/glial progenitor cells (GPSs), including human astrocyte-biased glial progenitor cells, human oligodendrocyte-biased glial progenitor cells, and human unbiased glial progenitor cells; human glial cells; human neurons, including human spinal motor neurons, human medium spiny neurons, human cortical neurons, and human striatal neurons; human astrocytes; human oligodendrocytes; or human dorsal root ganglia sensory neurons (DRG neurons).

[0126] In some embodiments, the cell is a human cell. A cell may be of or derived from different tissues, organs, and/or cell types. In some embodiments, the cell is a primary cell. In some embodiments, the term primary cell means a cell isolated from an organism, e.g., a mammal, which is grown in tissue culture (i.e., in vitro) for the first time before subdivision and transfer to a subculture. In some non-limiting examples, mammalian primary cells can be modified through introduction of one or more polynucleotides, polypeptides, and/or prime editing compositions (e.g., through transfection, transduction, electroporation and the like) and further passaged. Such modified mammalian primary cells include muscle cells (e.g., cardiac muscle cells, smooth muscle cells, myosatellite cells), epithelial cells (e.g., mammary epithelial cells, intestinal epithelial cells, hepatocytes), endothelial cells, glial cells, neural cells, formed elements of the blood (e.g., lymphocytes, bone marrow cells), precursors of any of these somatic cell types, and stem cells. In some embodiments, the cell is a fibroblast. In some embodiments, the cell is a human fibroblast. In some embodiments, the cell is a myogenic cell. In some embodiments, the cell is a myoblast. In some embodiments, the cell is a human myogenic cell. In some embodiments, the cell is a human myoblast. In some embodiments, the cell is a primary muscle cell. In some embodiments, the cell is a myosatellite cell (a satellite cell). In some embodiments, the cell is a human myosatellite cell (a satellite cell). In some embodiments, the cell is a stem cell. In some embodiments, the cell is an embryonic stem cell (ESC). In some embodiments, the cell is an induced human pluripotent stem cell (iPSC). In some embodiments, the cell is a human stem cell. In some embodiments, the cell is a human embryonic stem cell.

[0127] In some embodiments, a cell is not isolated from an organism but forms part of a tissue or organ of an organism, e.g., a mammal. In some non-limiting examples, mammalian cells include muscle cells (e.g., cardiac muscle cells, smooth muscle cells, myosatellite cells), epithelial cells (e.g., mammary epithelial cells, intestinal epithelial cells, hepatocytes), endothelial cells, glial cells, neural cells, formed elements of the blood (e.g., lymphocytes, bone marrow cells), precursors of any of these somatic cell types, and stem cells. In some embodiments, the cell is a primary muscle cell. In some embodiments, the cell is a myosatellite cell (a satellite cell). In some embodiments, the cell is a human myosatellite cell (a satellite cell). In some embodiments, the cell is an FRDA relevant cell. In some embodiments, the cell is stem cell. In some embodiments, the cell is a human stem cell.

[0128] In some embodiments, the cell is a progenitor cell. In some embodiments, the cell is a differentiated cell. In some embodiments, the cell is a fibroblast. In some embodiments, the cell is a myogenic cell. In some embodiments, the cell is a myoblast. In some embodiments, the cell is a human myogenic cell. In some embodiments, the cell is a human myoblast. In some embodiments, the cell is a differentiated muscle cell. In some embodiments, the cell is a myosatellite cell. In some embodiments, the cell is a skeletal muscle cell. In some embodiments, the skeletal muscle cell is differentiated from an iPSC, ESC or myosatellite cell. In some embodiments, the cell is a differentiated human cell. In some embodiments, the cell is a human fibroblast. In some embodiments, the cell is a differentiated human muscle cell. In some embodiments, the cell is a human myosatellite cell. In some embodiments, the cell is a human skeletal muscle cell. In some embodiments, the human skeletal muscle cell is differentiated from a human iPSC, human ESC or human myosatellite cell. In some embodiments, a human myosatellite cell is differentiated from a human iPSC or human ESC.

[0129] In some embodiments, the cell comprises a prime editor or a prime editing composition. In some embodiments, the cell comprises a dual prime editing composition comprising a prime editor and at least two PEgRNAs that are different from each other. In some embodiments, the cell is from a human subject. In some embodiments, the human subject has a disease or condition associated with one or more mutations to be corrected by prime editing, for example, Friedreich ataxia. In some embodiments, the cell is from a human subject, and comprises a prime editor or a prime editing composition for correction of the one or more mutations. In some embodiments, the cell is from the human subject and the mutation has been edited or corrected by prime editing. In some embodiments, the cell is in a human subject, and comprises a prime editor or a prime editing composition for correction of one or more mutations. In some embodiments, the cell is from the human subject and the mutation has been edited or corrected by prime editing.

[0130] The term “substantially” as used herein may refer to a value approaching 100% of a given value. In some embodiments, the term may refer to an amount that may be at least about 70%, 80%, 90%, 91%, 92%, 93%, 94%, 95%, 96%, 97%, 98%, 99%, 99.9%, or 99.99% of a total amount. In some embodiments, the term may refer to an amount that may be about 100% of a total amount.

[0131] The terms “protein” and “polypeptide” can be used interchangeably to refer to a polymer of two or more amino acids joined by covalent bonds (e.g., an amide bond) that can adopt a three-dimensional conformation. In some embodiments, a protein or polypeptide comprises at least 10 amino acids, 15 amino acids, 20 amino acids, 30 amino acids or 50 amino acids joined by covalent bonds (e.g., amide bonds). In some embodiments, a protein comprises at least two amide bonds. In some embodiments, a protein comprises multiple amide bonds. In some embodiments, a protein comprises an enzyme, enzyme precursor proteins, regulatory protein, structural protein, receptor, nucleic acid binding protein, a biomarker, a member of a specific binding pair (e.g., a ligand or aptamer), or an antibody. In some embodiments, a protein may be a full-length protein (e.g., a fully processed protein having certain biological function). In some embodiments, a protein may be a variant or a fragment of a full-length protein. For example, in some embodiments, a Cas9 protein domain comprises an H840A amino acid substitution compared to a naturally occurring S. pyogenes Cas9 protein. A variant of a protein or enzyme, for example a variant reverse transcriptase, comprises a polypeptide having an amino acid sequence that is about 60% identical, about 70% identical, about 80% identical, about 90% identical, about 95% identical, about 96% identical, about 97% identical, about 98% identical, about 99% identical, about 99.5% identical, or about 99.9% identical to the amino acid sequence of a reference protein.

[0132] In some embodiments, a protein comprises one or more protein domains or subdomains. As used herein, the term “polypeptide domain”, “protein domain”, or “domain” when used in the context of a protein or polypeptide, refers to a polypeptide chain that has one or more biological functions, e.g., a catalytic function, a protein-protein binding function, or a protein-DNA function. In some embodiments, a protein comprises multiple protein domains. In some embodiments, a protein comprises multiple protein domains that are naturally occurring. In some embodiments, a protein comprises multiple protein domains from different naturally occurring proteins. For example, in some embodiments, a prime editor may be a fusion protein comprising a Cas9 protein domain of S. pyogenes and a reverse transcriptase protein domain of Moloney murine leukemia virus. A protein that comprises amino acid sequences from different origins or naturally occurring proteins may be referred to as a fusion, or chimeric protein.

[0133] In some embodiments, a protein comprises a functional variant or functional fragment of a full-length wild-type protein. A “functional fragment” or “functional portion”, as used herein, refers to any portion of a reference protein (e.g., a wild-type protein) that encompasses less than the entire amino acid sequence of the reference protein while retaining one or more of the functions, e.g., catalytic or binding functions. For example, a functional fragment of a reverse transcriptase may encompass less than the entire amino acid sequence of a wild-type reverse transcriptase, but retains the ability under at least one set of conditions to catalyze the polymerization of a polynucleotide. When the reference protein is a fusion of multiple functional domains, a functional fragment thereof may retain one or more of the functions of at least one of the functional domains. For example, a functional fragment of a Cas9 may encompass less than the entire amino acid sequence of a wild-type Cas9, but retains its DNA binding ability and lacks its nuclease activity partially or completely.

[0134] A “functional variant” or “functional mutant”, as used herein, refers to any variant or mutant of a reference protein (e.g., a wild-type protein) that encompasses one or more alterations to the amino acid sequence of the reference protein while retaining one or more of the functions, e.g., catalytic or binding functions. In some embodiments, the one or more alterations to the amino acid sequence comprises amino acid substitutions, insertions or deletions, or any combination thereof. In some embodiments, the one or more alterations to the amino acid sequence comprises amino acid substitutions. For example, a functional variant of a reverse transcriptase may comprise one or more amino acid substitutions compared to the amino acid sequence of a wild-type reverse transcriptase, but retains the ability under at least one set of conditions to catalyze the polymerization of a polynucleotide. When the reference protein is a fusion of multiple functional domains, a functional variant thereof may retain one or more of the functions of at least one of the functional domains. For example, in some embodiments, a functional variant of a Cas9 may comprise one or more amino acid substitutions in a nuclease domain, e.g., an H840A amino acid substitution, compared to the amino acid sequence of a wild-type Cas9, but retains the DNA binding ability and lacks the nuclease activity partially or completely.

[0135] The term “function” and its grammatical equivalents as used herein may refer to a capability of operating, having, or serving an intended purpose. Functional may comprise any percent from baseline to 100% of an intended purpose. For example, functional may comprise or comprise about 5%, 10%, 15%, 20%, 25%, 30%, 35%, 40%, 45%, 50%, 55%, 60%, 65%, 70%, 75%, 80%, 85%, 90%, 95%, or up to about 100% of an intended purpose. In some embodiments, the term functional may mean over or over about 100% of normal function, for example, 125%, 150%, 175%, 200%, 250%, 300%, 400%, 500%, 600%, 700% or up to about 1000% of an intended purpose.

[0136] In some embodiments, a protein or polypeptide includes naturally occurring amino acids (e.g., one of the twenty amino acids commonly found in peptides synthesized in nature, and known by the one letter abbreviations A, R, N, C, D, Q, E, G, H, I, L, K, M, F, P, S, T, W, Y and V). In some embodiments, a protein or polypeptides includes non-naturally occurring amino acids (e.g., amino acids which is not one of the twenty amino acids commonly found in peptides synthesized in nature, including synthetic amino acids, amino acid analogs, and amino acid mimetics). In some embodiments, a protein or polypeptide is modified.

[0137] In some embodiments, a protein comprises an isolated polypeptide. The term “isolated” means free or removed to varying degrees from components which normally accompany it as found in the natural state or environment. For example, a polypeptide naturally present in a living animal is not isolated, and the same polypeptide partially or completely separated from the coexisting materials of its natural state is isolated.

[0138] In some embodiments, a protein is present within a cell, a tissue, an organ, or a virus particle. In some embodiments, a protein is present within a cell or a part of a cell (e.g., a bacteria cell, a plant cell, or an animal cell). In some embodiments, the cell is in a tissue, in a subject, or in a cell culture. In some embodiments, the cell is a microorganism (e.g., a bacterium, fungus, protozoan, or virus). In some embodiments, a protein is present in a mixture of analytes (e.g., a lysate). In some embodiments, the protein is present in a lysate from a plurality of cells or from a lysate of a single cell.

[0139] Gene homologs across species can be determined by sequence identity or similar function. Thus, the terms “homologous,” “homology,” or “percent homology” as used herein refer to the degree of sequence identity between an amino acid or polynucleotide sequence and a corresponding reference sequence. “Homology” can refer to polymeric sequences, e.g., polypeptide or DNA sequences that are similar. Homology can mean, for example, nucleic acid sequences with at least about: 50%, 55%, 60%, 65%, 70%, 75%, 80%, 81%, 82%, 83%, 84%, 85%, 86%, 87%, 88%, 89%, 90%, 91%, 92%, 93%, 94%, 95%, 96%, 97%, 98%, 99%, or 100% identity. In other embodiments, a “homologous sequence” of nucleic acid sequences may exhibit 93%, 95% or 98% sequence identity to the reference nucleic acid sequence. For example, a “region of homology to a genomic region” can be a region of DNA that has a similar sequence to a given genomic region in the genome. A region of homology can be of any length that is sufficient to promote stable binding of a spacer, primer binding site or protospacer sequence to the complementary sequence of a genomic region. For example, the region of homology can comprise at least 5, 10, 11, 12, 13, 14, 15, 16, 17, 18, 19, 20, 21, 22, 23, 24, 25, 30, 35, 40, 45, 50, 55, 60, 65, 70, 75, 80, 85, 90, 95, 100, 200, 300, 400, 500, 600, 700, 800, 900, 1000, 1100, 1200, 1300, 1400, 1500, 1600, 1700, 1800, 1900, 2000, 2100, 2200, 2300, 2400, 2500, 2600, 2700, 2800, 2900, 3000, 3100 or more bases in length such that the region of homology has sufficient homology to undergo binding to the complementary sequence of a corresponding genomic region.

[0140] When a percentage of sequence homology or identity is specified, in the context of two nucleic acid sequences or two polypeptide sequences, the percentage of homology or identity generally refers to the alignment of two or more sequences across a portion of their length when compared and aligned for maximum correspondence. When a position in the compared sequence can be occupied by the same base or amino acid, then the molecules can be homologous at that position. Unless stated otherwise, sequence homology or identity is assessed over the specified length of the nucleic acid, polypeptide or portion thereof. In some embodiments, the homology or identity is assessed over a functional portion or specified portion of the length.

[0141] Alignment of sequences for assessment of sequence homology can be conducted by algorithms known in the art, such as the Basic Local Alignment Search Tool (BLAST) algorithm, which is described in Altschul et al, J. Mol. Biol. 215:403-410, 1990. A publicly available, internet interface, for performing BLAST analyses is accessible through the National Center for Biotechnology Information. Additional known algorithms include those published in: Smith & Waterman, “Comparison of Biosequences”, Adv. Appl. Math. 2:482, 1981; Needleman & Wunsch, “A general method applicable to the search for similarities in the amino acid sequence of two proteins” J. Mol. Biol. 48:443, 1970; Pearson & Lipman “Improved tools for biological sequence comparison”, Proc. Natl. Acad. Sci. USA 85:2444, 1988; or by automated implementation of these or similar algorithms. Global alignment programs may also be used to align similar sequences of roughly equal size. Examples of global alignment programs include NEEDLE (available at www.ebi.ac.uk/Tools/psa/emboss_needle/) which is part of the EMBOSS package (Rice P et al., Trends Genet., 2000; 16: 276-277), and the GGSEARCH program https://fasta.bioch.virginia.edu/fasta_www2/, which is part of the FASTA package (Pearson W and Lipman D, 1988, Proc. Natl. Acad. Sci. USA, 85: 2444-2448). Both of these programs are based on the Needleman-Wunsch algorithm which is used to find the optimum alignment (including gaps) of two sequences along their entire length. A detailed discussion of sequence analysis can also be found in Unit 19.3 of Ausubel et al (“Current Protocols in Molecular Biology” John Wiley & Sons Inc, 1994-1998, Chapter 15, 1998). In some embodiments, alignment between a query sequence and a reference sequence is performed with Needleman-Wunsch alignment with Gap Costs set to Existence: 11 Extension: 1 where percent identity is calculated by dividing the number of identities by the length of the alignment, as further described in Altschul et al. (“Gapped BLAST and PSI-BLAST: a new generation of protein database search programs”, Nucleic Acids Res. 25:3389-3402, 1997) and Altschul et al, (“Protein database searches using compositionally adjusted substitution matrices”, FEBS J. 272:5101-5109, 2005)

[0142] A skilled person understands that amino acid (or nucleotide) positions may be determined in homologous sequences based on alignment, for example, “H840” in a reference Cas9 sequence may correspond to H839, or another position in a Cas9 homolog.

[0143] The term “polynucleotide” or “nucleic acid molecule” can be any polymeric form of nucleotides, including DNA, RNA, a hybridization thereof, or RNA-DNA chimeric molecules. In some embodiments, a polynucleotide comprises cDNA, genomic DNA, mRNA, tRNA, rRNA, or microRNA. In some embodiments, a polynucleotide is double-stranded, e.g., a double-stranded DNA in a gene. In some embodiments, a polynucleotide is single-stranded or substantially single-stranded, e.g., single-stranded DNA or an mRNA. In some embodiments, a polynucleotide is a cell-free nucleic acid molecule. In some embodiments, a polynucleotide circulates in blood. In some embodiments, a polynucleotide is a cellular nucleic acid molecule. In some embodiments, a polynucleotide is a cellular nucleic acid molecule in a cell circulating in blood.

[0144] Polynucleotides can have any three-dimensional structure. The following are nonlimiting examples of polynucleotides: a gene or gene fragment (for example, a probe, primer, EST or SAGE tag), an exon, an intron, intergenic DNA (including, without limitation, heterochromatic DNA), messenger RNA (mRNA), transfer RNA (tRNA), ribosomal RNA (rRNA), a ribozyme, cDNA, a recombinant polynucleotide, a branched polynucleotide, a plasmid, a vector, isolated DNA, isolated RNA, sgRNA, guide RNA, a nucleic acid probe, a primer, an snRNA, a long non-coding RNA, a snoRNA, a siRNA, a miRNA, a tRNA-derived small RNA (tsRNA), an antisense RNA, an shRNA, or a small rDNA-derived RNA (srRNA).

[0145] In some embodiments, a polynucleotide comprises deoxyribonucleotides, ribonucleotides or analogs thereof. In some embodiments, a polynucleotide comprises modified nucleotides, such as methylated nucleotides and nucleotide analogs. If present, modifications to the nucleotide structure can be imparted before or after assembly of the polynucleotide. The sequence of nucleotides can be interrupted by non-nucleotide components. A polynucleotide can be further modified after polymerization, such as by conjugation with a labeling component.

[0146] In some embodiments, a polynucleotide is composed of a specific sequence of four nucleotide bases: adenine (A); cytosine (C); guanine (G); thymine (T); and uracil (U) for thymine when the polynucleotide is RNA. In some embodiments, the polynucleotide may comprise one or more other nucleotide bases, such as inosine (I), which is read by the translation machinery as guanine (G).

[0147] In some embodiments, a polynucleotide may be modified. As used herein, the terms “modified” or “modification” refers to chemical modification with respect to the A, C, G, T and U nucleotides. In some embodiments, modifications may be on the nucleoside base and/or sugar portion of the nucleosides that comprise the polynucleotide. In some embodiments, the modification may be on the internucleoside linkage (e.g., phosphate backbone). In some embodiments, multiple modifications are included in the modified nucleic acid molecule. In some embodiments, a single modification is included in the modified nucleic acid molecule.

[0148] The term “complement”, “complementary”, or “complementarity” as used herein, refers to the ability of two polynucleotide molecules to base pair with each other. Complementary polynucleotides may base pair via hydrogen bonding, which may be Watson Crick, Hoogsteen or reversed Hoogsteen hydrogen bonding. For example, an adenine on one polynucleotide molecule will base pair to a thymine or uracil on a second polynucleotide molecule and a cytosine on one polynucleotide molecule will base pair to a guanine on a second polynucleotide molecule. Two polynucleotide molecules are complementary to each other when a first polynucleotide molecule comprising a first nucleotide sequence can base pair with a second polynucleotide molecule comprising a second nucleotide sequence. For instance, the two DNA molecules 5′-ATGC-3′ and 5′-GCAT-3′ are complementary, and the complement of the DNA molecule 5′-ATGC-3′ is 5′-GCAT-3′. A percentage of complementarity indicates the percentage of nucleotides in a polynucleotide molecule which can base pair with a second polynucleotide molecule (e.g., 5, 6, 7, 8, 9, 10 out of 10 being 50%, 60%, 70%, 80%, 90%, and 100% complementary, respectively). “Perfectly complementary” means that all the contiguous nucleotides of a polynucleotide molecule will base pair with the same number of contiguous nucleotides in a second polynucleotide molecule. “Substantially complementary” as used herein refers to a degree of complementarity that can be 70%, 75%, 80%, 85%, 90%, 95%, 97%, 98%, or 99% over all or a portion of two polynucleotide molecules. In some embodiments, the portion of complementarity may be a region of 10, 15, 20, 25, 30, 35, 40, 45, 50, or more nucleotides. In some embodiments, the portion of complementarity between the two polynucleotide molecules is at least 60%, 65%, 70%, 75%, 80%, 85%, 90%, 95%, 97%, 98%, or 99% of the length of at least one of the two polynucleotide molecules or a functional or defined portion thereof.

[0149] As used herein, “expression” refers to the process by which polynucleotides are transcribed into mRNA and/or the process by which polynucleotides, e.g., the transcribed mRNA, are translated into peptides, polypeptides, or proteins. If the polynucleotide is derived from genomic DNA, expression may include splicing of the mRNA in a eukaryotic cell. In some embodiments, expression of a polynucleotide, e.g., a gene or a DNA encoding a protein, is determined by the amount of the protein encoded by the gene after transcription and translation of the gene. In some embodiments, expression of a polynucleotide, e.g., a gene or a DNA encoding a protein, is determined by the amount of a functional form of the protein encoded by the gene after transcription and translation of the gene. In some embodiments, expression of a gene is determined by the amount of the mRNA, or transcript that is encoded by the gene after transcription of the gene. In some embodiments, expression of a polynucleotide, e.g., an mRNA, is determined by the amount of the protein encoded by the mRNA after translation of the mRNA. In some embodiments, expression of a polynucleotide, e.g., an mRNA or coding RNA, is determined by the amount of a functional form of the protein encoded by the polypeptide after translation of the polynucleotide.

[0150] The terms “equivalent” or “biological equivalent” are used interchangeably when referring to a particular molecule, or biological or cellular material, and means a molecule having minimal homology to another molecule while still maintaining a desired structure or functionality.

[0151] The term “encode” as it is applied to polynucleotides refers to a polynucleotide which is said to “encode” another polynucleotide, a polypeptide, or an amino acid if, in its native state or when manipulated by methods well known to those skilled in the art, it can be used as polynucleotide synthesis template, e.g., transcribed into an RNA, reverse transcribed into a DNA or cDNA, and/or translated to produce an amino acid, or a polypeptide or fragment thereof. In some embodiments, a polynucleotide comprising three contiguous nucleotides form a codon that encodes a specific amino acid. In some embodiments, a polynucleotide comprises one or more codons that encode a polypeptide. In some embodiments, a polynucleotide comprising one or more codons comprises a mutation in a codon compared to a wild-type reference polynucleotide. In some embodiments, the mutation in the codon encodes an amino acid substitution in a polypeptide encoded by the polynucleotide as compared to a wild-type reference polypeptide. The term “mutation” or “variant” as used herein refers to a change and/or alteration in an amino acid sequence of a protein or nucleic acid sequence of a polynucleotide. Such changes and/or alterations may comprise the substitution, insertion, deletion and/or truncation of one or more amino acids, in the case of an amino acid sequence, and/or nucleotides, in the case of nucleic acid sequence, compared to a reference amino acid or nucleic acid sequence. A mutation in a polynucleotide may be insertion or expansion of one or more nucleotides, or for example, an expansion of three nucleotides (tri-nucleotide expansion). In some embodiments, the reference sequence is a wild-type sequence. In some embodiments, a mutation in a nucleic acid sequence of a polynucleotide encodes a mutation in the amino acid sequence of a polypeptide. In some embodiments, the mutation in the amino acid sequence of a polypeptide or the mutation in the nucleic acid sequence of a polynucleotide is a mutation associated with a disease state.

[0152] The term “subject” and its grammatical equivalents as used herein may refer to a human or a non-human. A subject may be a mammal. A human subject may be male or female. A human subject may be of any age. A subject may be a human embryo. A human subject may be a newborn, an infant, a child, an adolescent, or an adult. A human subject may be in need of treatment for a genetic disease or disorder.

[0153] The terms “treatment” or “treating” and their grammatical equivalents may refer to the medical management of a subject with an intent to cure, ameliorate, or ameliorate a symptom of, a disease, condition, or disorder. Treatment may include active treatment, that is, treatment directed specifically toward the improvement of a disease, condition, or disorder. Treatment may include causal treatment, that is, treatment directed toward removal of the cause of the associated disease, condition, or disorder. In addition, this treatment may include palliative treatment, that is, treatment designed for the relief of symptoms rather than the curing of the disease, condition, or disorder. Treatment may include supportive treatment, that is, treatment employed to supplement another specific therapy directed toward the improvement of the disease, condition, or disorder. In some embodiments, a condition may be pathological. In some embodiments, a treatment may not completely cure or prevent a disease, condition, or disorder. In some embodiments, a treatment ameliorates, but does not completely cure or prevent a disease, condition, or disorder. In some embodiments, a subject may be treated for 12 hours, 24 hours, 2 days, 3 days, 4 days, 5 days, 6 days, 7 days, 2 weeks, 3 weeks, 4 weeks, 2 months, 3 months, 4 months, 5 months, 6 months, 1 year, 2 years, 3 years, 4 years, 5 years, 6 years, indefinitely, or life of the subject.

[0154] The term “ameliorate” and its grammatical equivalents means to decrease, suppress, attenuate, diminish, arrest, or stabilize the development or progression of a disease.

[0155] The terms “prevent” or “preventing” means delaying, forestalling, or avoiding the onset or development of a disease, condition, or disorder for a period of time. Prevent also means reducing risk of developing a disease, disorder, or condition. Prevention includes minimizing or partially or completely inhibiting the development of a disease, condition, or disorder. In some embodiments, a composition, e.g., a pharmaceutical composition, prevents a disorder by delaying the onset of the disorder for 12 hours, 24 hours, 2 days, 3 days, 4 days, 5 days, 6 days, 7 days, 2 weeks, 3 weeks, 4 weeks, 2 months, 3 months, 4 months, 5 months, 6 months, 1 year, 2 years, 3 years, 4 years, 5 years, 6 years, indefinitely, or life of a subject.

[0156] The term “construct” refers to a polynucleotide or a portion of a polynucleotide, comprising one or more nucleic acid sequences encoding one or more transcriptional products and/or proteins. A construct may be a recombinant nucleic acid molecule or a part thereof. In some embodiments, the one or more nucleic acid sequences of a construct are operably linked to one or more regulatory sequences, for example, transcriptional initiation regulatory sequences. In some embodiments, a construct is a vector, a plasmid, or a portion thereof. In some embodiments, a construct comprises DNA. In some embodiments, a construct comprises RNA. In some embodiments, a construct is double-stranded. In some embodiments, a construct is single-stranded. In some embodiments, a construct comprises an expression cassette. An expression cassette means a polynucleotide comprising a nucleic acid sequence that encodes one or more transcriptional products and is operably linked to at least one transcriptional regulatory sequence, e.g., a promoter.

[0157] The term “exogenous” when used in reference to a biomolecule, e.g., a polynucleotide sequence or a polypeptide sequence refers to a biomolecule that is not native to a specific biological context, e.g., a gene, a particular chromosome, a particular cell or chromosomal site of the cell, tissue, or organism, or, if from the same source, is modified from its original form or is present in a non-native location, e.g., a chromosome location.

[0158] The term “endogenous” when used in reference to a biomolecule, e.g., a polynucleotide sequence or a polypeptide sequence refers to a biomolecule that is native to or naturally occurring in a specific biological context, e.g., a gene, a particular chromosome, a particular cell or chromosomal site of the cell, tissue, or organism. For example, an endogenous sequence may be a wild-type sequence or may comprise one or more mutations compared to a wild-type sequence. In some embodiments, an endogenous sequence is mutated compared to a wild-type sequence and may cause or be associated with a disease or disorder in a subject. As used herein, in some embodiments, a wild-type sequence, with respect to a specific gene and a specific disease, is a gene sequence found in healthy individuals, wherein the wild-type sequence does not include a mutation causative of the specific disease. In some embodiments, in the context of repeat expansion disease, a wild-type sequence may be used to refer to a sequence that harbors an array of a specific tri-nucleotide repeats within a normal range. For example, in some embodiments, the tri-nucleotide repeat is a GAA repeat in a FXN gene, and a wild-type sequence of a FXN gene may have 5 to 33 GAA repeats (normal alleles).

[0159] A “repeat expansion disorder” or “trinucleotide repeat disorder” or “expansion repeat disorder” refers to a set of genetic disorders which are caused by “trinucleotide repeat expansion,” which is a kind of mutation characterized by expanded number of repeats of an contiguous array of three nucleotides each having the same sequence, referred to as “trinucleotide repeats” or “triplet repeats”). As used herein, an array of tri-nucleotide repeats means at least two contiguous tri-nucleotides that are the same. In some embodiments, an array of tri-nucleotide repeats comprises 2, 3, 4, 5, 6, 7, 8, 9, 10, 11, 12, 13, 14, 15, 16, 17, 18, 19, 20, 21, 22, 23, 24, 25, 26, 27, 28, 29, 30, 31, 32, 33, 34, 35, 36, 37, 38, 39, 40, 41, 42, 43, 44, 45, 46, 47, 48, 49, 50, 51, 52, 53, 54, 55, 56, 57, 58, 59, 60, 61, 62, 63, 64, 65, 66, 67, 68, 69, 70, 71, 72, 73, 74, 75, 76, 77, 78, 79, 80, 81, 82, 83, 84, 85, 86, 87, 88, 89, 90, 91, 92, 93, 94, 95, 96, 97, 98, 99, 100, 101, 102, 103, 104, 105, 106, 107, 108, 109, 110, 111, 112, 113, 114, 115, 116, 117, 118, 119, 120, 121, 122, 123, 124, 125, 126, 127, 128, 129, 130, 131, 132, 133, 134, 135, 136, 137, 138, 139, 140, 141, 142, 143, 144, 145, 146, 147, 148, 149, 150, 151, 152, 153, 154, 155, 156, 157, 158, 159, 160, 161, 162, 163, 164, 165, 166, 167, 168, 169, 170, 171, 172, 173, 174, 175, 176, 177, 178, 179, 180, 181, 182, 183, 184, 185, 186, 187, 188, 189, 190, 191, 192, 193, 194, 195, 196, 197, 198, 199, or 200 repeats of the same tri-nucleotides. In some embodiments, an array of tri-nucleotide repeats comprises at least 100, 150, 200, 250, 300, 350, 400, 450, 500, 550, 600, 650, 700, 750, 800, 850, 900, 950, 1000, 1050, 1100, 1150, 1200, 1250, 1300, 1350, 1400, 1450, or 1500 repeats of the same tri-nucleotides. In some embodiments, an array of tri-nucleotide repeats comprises about 50 to 100, about 100 to 150, about 150 to 200, about 200 to 250, about 250 to 300, about 300 to 400, about 400 to 500, about 500 to 600, about 600 to 700, about 700 to 800, about 800 to 900, about 900 to 1000 repeats, about 1000-1100 repeats, about 1100-1200 repeats, about 1200-1300 repeats, about 1300-1400 repeats, about 1400-1700 or more repeats of the same tri-nucleotides. In some embodiments, an array of tri-nucleotide repeats comprises more than 1000 repeats of the same tri-nucleotides. In some embodiments, an array of tri-nucleotide repeats comprises more than 1200 repeats of the same tri-nucleotides. In some embodiments, an array of tri-nucleotide repeats comprises more than 1400 repeats of the same tri-nucleotides. In some embodiments, an array of tri-nucleotide repeats comprises more than 1600 repeats of the same tri-nucleotides. In some embodiments, an array of tri-nucleotide repeats comprises about 5 to 10, 5 to 15, 5 to 20, 5 to 25, 5 to 30, 5 to 35, 5 to 40, 5 to 45, 5 to 50, 10 to 15, 10 to 20, 10 to 25, 10 to 30, 10 to 35, 10 to 40, 10 to 45, 10 to 50, 15 to 20, 15 to 25, 15 to 30, 15 to 35, 15 to 40, 15 to 45, 15 to 50, 20 to 25, 20 to 30, 20 to 35, 20 to 40, 20 to 45, 20 to 50, 25 to 30, 25 to 35, 25 to 40, 25 to 45, 25 to 50, 30 to 35, 30 to 40, 30 to 45, 30 to 50, 35 to 40, 35 to 45, 35 to 50, 40 to 45, 40 to 50, or 45 to 50 repeats of the same tri-nucleotides. In some embodiments, an array of tri-nucleotide repeats is in a non-coding region of a gene, for example, a 3′ UTR, a 5′ UTR, or an intron of a gene. In some embodiments, an array of tri-nucleotide repeats is in a regulatory sequence, e.g., a promoter, of a gene. In some embodiments, an array of tri-nucleotide repeats is in an upstream sequence or a downstream sequence of a gene. In some embodiments, an array of tri-nucleotide repeats is in a coding region of a gene. In some embodiments, an array of tri-nucleotide repeats encodes an array of amino acid repeats. In some embodiments, the number of repeats of the same tri-nucleotides in an array of tri-nucleotide repeats is altered as compared to the number of repeats in a reference array of tri-nucleotide repeats, for example, the number of repeats in a wild-type gene sequence. In some embodiments, the number of repeats of the same tri-nucleotides in an array of tri-nucleotide repeats is increased as compared to the number of repeats in a reference array of tri-nucleotide repeats, for example, the number of repeats in a wild-type gene sequence. In some embodiments, the altered or increased number of repeats in an array of tri-nucleotide repeats compared to the number of the same repeats in a wild-type gene sequence is associated with a disease.

### Dual Prime Editing

[0160] In some embodiments, prime editing may comprise programmable editing of a target DNA using one or more prime editors each complexed with a PEgRNA (“dual prime editing”). Dual prime editing refers to programmable editing of a double-stranded target DNA using two or more PEgRNAs, each of which is complexed with a prime editor for incorporating one or more intended nucleotide edits into the double-stranded target DNA. In some embodiments, dual prime editing incorporates one or more intended nucleotide edits into a double-stranded target DNA through excision of an endogenous DNA segment and/or replacement of the endogenous DNA segment with newly synthesized DNA via target-primed DNA synthesis. In some embodiments, dual prime editing may be used to edit a target DNA that is or is part of a target gene. In some embodiments, the target gene is a disease-associated gene. In some embodiments, the target gene is a monogenic disease-associated gene. In some embodiments, the target gene is a polygenic disease-associated gene. In some embodiments, the target gene is mutated compared to a wild-type sequence of the same gene and may cause or be associated with a disease or disorder in a subject. In some embodiments, the mutated target gene causes a disease or a disorder in a human subject.

[0161] The term “prime editing” refers to programmable editing of a target DNA using a prime editor complexed with a PEgRNA to incorporate an intended nucleotide edit into the target DNA through target-primed DNA synthesis. In prime editing, a target DNA may comprise a double stranded DNA molecule having two complementary strands. When viewed in the context of each specific PEgRNA, the two complementary strands of a double stranded target DNA may comprise a first strand that may be referred to as a “target strand” or a “non-edit strand”, and a second strand that is complementary to the first strand and may be referred to as a “non-target strand,” or an “edit strand.” In some embodiments, in a prime editing guide RNA (PEgRNA), a spacer sequence is complementary or substantially complementary to a specific sequence on the target strand, which may be referred to as a “search target sequence”. In some embodiments, the spacer sequence anneals with the target strand at the search target sequence. The target strand may also be referred to as the “non-Protospacer Adjacent Motif (non-PAM strand).” In some embodiments, the non-target strand may also be referred to as the “PAM strand”. In some embodiments, the PAM strand comprises a protospacer sequence and optionally a PAM sequence. A protospacer sequence refers to a specific sequence in the PAM strand of the target gene that is complementary to the search target sequence. In a PEgRNA, a spacer sequence may have a substantially identical sequence as the protospacer sequence on the edit strand of a target gene, except that the spacer sequence may comprise uracil (U) and the protospacer sequence may comprise thymine (T).

[0162] In some embodiments, dual prime editing involves using two different PEgRNAs each complexed with a prime editor, wherein each of the two PEgRNAs comprises a spacer complementary or substantially complementary to a separate search target sequence. In some embodiments, each of the two PEgRNAs anneals with a separate search target sequence through its spacer. Accordingly, references to a “PAM strand”, a “non-PAM strand”, a “target strand’, a “non-target strand”, an “edit strand” or a “non-edit strand” are relative in the context of a specific PEgRNA, e.g., one of the two PEgRNAs in dual prime editing.

[0163] In some embodiments, dual prime editing involves two PEgRNAs, different from one another, each complexed with a prime editor. In some embodiments, each of the two PEgRNAs comprises a region of complementarity to a distinct search target sequence of the target DNA, wherein the two distinct search target sequences are on the two complementary strands of the target DNA. The terms “region”, “portion”, and “segment” are used interchangeably to refer to a proportion of a molecule, for example, a polynucleotide or a polypeptide. For example, a region of a polynucleotide may be 5%, 10%, 15%, 20%, 25%, 30%, 35%, 40%, 45%, 50%, 55%, 60%, 65%, 70%, 75%, 80%, 85%, 90%, 95% or 100% of the polynucleotide. In some embodiments, the two PEgRNAs each can direct a prime editor to initiate the prime editing process on the two complementary strands of the target DNA.

[0164] In some embodiments, dual prime editing involves two PEgRNAs each complexed with a prime editor. In some embodiments, a first PEgRNA comprises a first spacer complementary to a first search target sequence on a first strand of a double-stranded target DNA, e.g., a double-stranded target gene. In the context of the first PEgRNA, the first strand of the double-stranded target DNA may be referred to as a first target strand, and the complementary strand referred to as the first PAM strand.

[0165] In some embodiments, a second PEgRNA comprises a second spacer complementary to a second search target sequence on a second strand of the double-stranded target DNA. In some embodiments, the first strand and the second strand of the double-stranded target DNA, e.g., a double-stranded target gene, are complementary to each other. Accordingly, in some embodiments, the second PEgRNA and the first PEgRNA bind opposite strands of the double-stranded target DNA. In the context of the second PEgRNA, the second strand of the double-stranded target DNA may be referred to as a second target strand, and the complementary strand referred to as the second PAM strand. In some embodiments, the first target strand is the same strand as the second PAM strand of the double-stranded target DNA. In some embodiments, the second target strand is the same strand as the first PAM strand of the double-stranded target DNA.

[0166] As used herein for editing of the FXN gene, the first PEgRNA may also be referred to as the “5′ PEgRNA”, and the second PEgRNA may be referred to as the “3′ PEgRNA”. Specifically, the 5′ to 3′ orientation of the FXN gene refers to the 5′ to 3′ orientation of the coding strand (i.e., sense strand) of the FXN gene. The first PEgRNA (5′ PEgRNA) comprises a first spacer having complementarity to a first search target sequence on the non-coding strand of FAN, and is capable of directing a prime editor to nick the coding strand at a first nick site that is 5′ to the GAA repeats. The second PEgRNA (3′ PEgRNA) comprises a second spacer having complementarity to a second search target sequence on the coding strand of FAN, and is capable of directing a prime editor to nick the non-coding strand at a second nick site that is 5′ to the TTC repeats (that is, the position corresponding to the second nick site on the coding strand is 3′ to the GAA repeats). An exemplary dual prime editing strategy for editing the FXN gene is provided in FIG. 4A, where the first strand (bottom) is the non-coding strand, and the second strand (top) is the coding strand. The (GAA) repeats are accordingly in the coding strand, and the non-coding strand contains the complementary (TTC) repeats. A 5′ PEgRNA complexed with a prime editor is at the left side of the figure, and a 3′ PEgRNA complexed with a prime editor is at the right side.

[0167] In some embodiments, the first PEgRNA anneals with the first target strand of the double-stranded target DNA, through the first spacer of the first PEgRNA. In some embodiments, the first PEgRNA complexes with and directs a first prime editor to bind the double-stranded target DNA at the position corresponding to the first search target sequence. In some embodiments, the second PEgRNA anneals with the second search target sequence on the second target strand of the double-stranded target DNA, through a second spacer of the second PEgRNA. In some embodiments, the second PEgRNA complexes with and directs a second prime editor to bind the double-stranded target DNA at the position corresponding to the second search target sequence. In some embodiments, the first prime editor and the second prime editor are the same. In some embodiments, the first prime editor and the second prime editor are different.

[0168] In some embodiments, the first search target sequence recognized by the spacer of the first PEgRNA and the second search target sequence recognized by the spacer of the second PEgRNA have a region of complementarity to each other. In some embodiments, the region of complementarity is 2 to 20 nucleotides in length. In some embodiments, the region of complementarity is 5 to 15 nucleotides in length.

[0169] In some embodiments, the first search target sequence recognized by the spacer of the first PEgRNA and the second search target sequence recognized by the spacer of the second PEgRNA do not have a region of complementarity to each other. In some embodiments, the positions of the first and second search target sequences relative to each other may be determined by their positions in the double-stranded target DNA prior to editing. In some embodiments, the positions of the first and second search target sequences relative to each other may be determined by their positions in a reference double-stranded target DNA.

[0170] In some embodiments, the 3′ end of the first search target sequence and the position corresponding to the 3′ end of the second search target sequence are 2, 3, 4, 5, 6, 7, 8, 9, 10, 11, 12, 13, 14, 15, 16, 17, 18, 19, 20, 21, 22, 23, 24, 25, 26, 27, 28, 29, 30, 31, 32, 33, 34, 35, 36, 37, 38, 39, 40, 41, 42, 43, 44, 45, 46, 47, 48, 49, 50, 51, 52, 53, 54, 55, 56, 57, 58, 59, 60, 61, 62, 63, 64, 65, 66, 67, 68, 69, 70, 71, 72, 73, 74, 75, 76, 77, 78, 79, 80, 81, 82, 83, 84, 85, 86, 87, 88, 89, 90, 91, 92, 93, 94, 95, 96, 97, 98, 99, or 100 nucleotides apart from each other. In some embodiments, the 3′ end of the first search target sequence and the position corresponding to the 3′ end of the second search target sequence are about 110, 120, 130, 140, 150, 160, 170, 180, 190, 200, 210, 220, 230, 240, 250, 260, 270, 280, 290, 300, 310, 320, 330, 340, 350, 360, 370, 380, 390, 400, 410, 420, 430, 440, 450, 460, 470, 480, 490, or 500 nucleotides apart from each other. In some embodiments, the 3′ end of the first search target sequence and the position corresponding to the 3′ end of the second search target sequence are about 500, 600, 700, 800, 900, 1000, 1100, 1200, 1300, 1400, 1500, 1600, 1700, 1800, 1900, 2000 or more nucleotides apart from each other. In some embodiments, the 3′ end of the first search target sequence and the position corresponding to the 3′ end of the second search target sequence are about 150 to about 450 nucleotides apart from each other. In some embodiments, the 3′ end of the first search target sequence and the position corresponding to the 3′ end of the second search target sequence are about 105 to about 145 nucleotides apart from each other. In some embodiments, the 3′ end of the first search target sequence and the position corresponding to the 3′ end of the second search target sequence are about 300 to about 3000 nucleotides apart from each other. In some embodiments, the 3′ end of the first search target sequence and the position corresponding to the 3′ end of the second search target sequence are at least about 3000 nucleotides apart from each other.

[0171] In some embodiments, the bound first prime editor generates a first nick on the first PAM strand of the double-stranded target DNA. In some embodiments, a first PEgRNA comprises a first primer binding site (PBS, also referred to herein as “primer binding site sequence”) that is complementary to the sequence of the first PAM strand of the double-stranded target DNA that is immediately upstream of the first nick site, and can anneal with the sequence of the first PAM strand at a free 3′ end formed at the first nick site. In some embodiments, a first PEgRNA comprises a first primer binding site (PBS) that anneals to a free 3′ end formed at the first nick site and the first prime editor initiates DNA synthesis from the nick site, using the free 3′ end as a primer. In some embodiments, the first prime editor generates a first newly synthesized single-stranded DNA encoded by a first editing template of the first PEgRNA.

[0172] In some embodiments, the bound second prime editor generates a second nick on the second PAM strand of the double-stranded target DNA. In some embodiments, the double-stranded target DNA, e.g., a target gene, comprises a double-stranded DNA sequence between the first nick generated by the first prime editor on the second target strand (also referred to as the first PAM strand) and the second nick generated by the second prime editor on the first target strand (also referred to as the second PAM strand), which may be referred to as an inter-nick duplex (IND). In some embodiments, the two strands of an IND are perfectly complementary to each other. In some embodiments, the two strands of an IND are partially complementary to each other. In some embodiments, the IND is subsequently excised from the double-stranded target DNA, e.g., the target gene.

[0173] In some embodiments, the IND is 1, 2, 3, 4, 5, 6, 7, 8, 9, 10, 11, 12, 13, 14, 15, 16, 17, 18, 19, 20 or more base pairs in length. In some embodiments, the IND is up to 5, up to 10, up to 15, up to 20, up to 25, up to 30, up to 40, or up to 50 base pairs in length. In some embodiments, the IND is 1-3000, 1-2500, 1-2000, 1-1500, 1-1000, 1-900, 1-800, 1-700, 1-600, 1-500, 1-400, 1-300, 1-200, 1-100, 1-50, 1-40, 1-30, 1-25, 1-20, 1-15, 1-10, or 1-5 base pairs in length. In some embodiments, the IND is 500-3000, 500-2500, 500-2000, 500-1500, 500-1000, 500-900, 500-800, 500-700, or 500-600 base pairs in length. In some embodiments, the IND is 30-300, 30-250, 30-200, 30-150, 30-100, 30-75, 30-50, 50-200, 50-150, 50-100, 50-75, 75-100, 75-150, 75-200, 75-250, 75-300 base pairs in length. In some embodiments, the IND is 1-3, 1-6, 1-9, 1-12, 1-15, 1-18, 1-21, 1-24, 1-27, 1-30, 1-36, 1-45, 1-60, 1-72, 1-90, 3-6, 3-9, 3-12, 3-15, 3-18, 3-21, 3-24, 3-27, 3-30, 3-36, 3-45, 3-60, 3-72, 3-90, 6-9, 6-12, 6-15, 6-18, 6-21, 6-24, 6-27, 6-30, 6-36, 6-45, 6-60, 6-72, 6-90, 9-12, 9-15, 9-18, 9-21, 9-24, 9-27, 9-30, 9-36, 9-45, 9-60, 9-72, 9-90, 12-15, 12-18, 12-21, 12-24, 12-27, 12-30, 12-36, 12-45, 12-60, 12-72, 12-90, 15-18, 15-21, 15-24, 15-27, 15-30, 15-36, 15-45, 15-60, 15-72, 15-90, 18-21, 18-24, 18-27, 18-30, 18-36, 18-45, 18-60, 18-72, 18-90, 21-24, 21-27, 21-30, 21-36, 21-45, 21-60, 21-72, 21-90, 24-27, 24-30, 24-36, 24-45, 24-60, 24-72, 24-90, 27-30, 27-36, 27-45, 27-60, 27-72, 27-90, 30-36, 30-45, 30-60, 30-72, 30-90, 45-60, 45-72, 60-72, 60-90, or 72-90 base pairs in length. In some embodiments, the IND is 1-3000, 1-2500, 1-2000, 1-1500, 1-1000, 1-900, 1-800, 1-700, 1-600, 1-500, 1-400, 1-300, 1-200, 1-100, 1-50, 1-40, 1-30, 1-25, 1-20, 1-15, 1-10, 1-5, 500-3000, 500-2500, 500-2000, 500-1500, 500-1000, 500-900, 500-800, 500-700, 500-600, 30-300, 30-250, 30-200, 30-150, 30-100, 30-75, 30-50, 50-200, 50-150, 50-100, 50-75, 75-100, 75-150, 75-200, 75-250, or 75-300 base pairs in length. In some embodiments, the IND is 1-3, 1-6, 1-9, 1-12, 1-15, 1-18, 1-21, 1-24, 1-27, 1-30, 1-36, 1-45, 1-60, 1-72, 1-90, 3-6, 3-9, 3-12, 3-15, 3-18, 3-21, 3-24, 3-27, 3-30, 3-36, 3-45, 3-60, 3-72, 3-90, 6-9, 6-12, 6-15, 6-18, 6-21, 6-24, 6-27, 6-30, 6-36, 6-45, 6-60, 6-72, 6-90, 9-12, 9-15, 9-18, 9-21, 9-24, 9-27, 9-30, 9-36, 9-45, 9-60, 9-72, 9-90, 12-15, 12-18, 12-21, 12-24, 12-27, 12-30, 12-36, 12-45, 12-60, 12-72, 12-90, 15-18, 15-21, 15-24, 15-27, 15-30, 15-36, 15-45, 15-60, 15-72, 15-90, 18-21, 18-24, 18-27, 18-30, 18-36, 18-45, 18-60, 18-72, 18-90, 21-24, 21-27, 21-30, 21-36, 21-45, 21-60, 21-72, 21-90, 24-27, 24-30, 24-36, 24-45, 24-60, 24-72, 24-90, 27-30, 27-36, 27-45, 27-60, 27-72, 27-90, 30-36, 30-45, 30-60, 30-72, 30-90, 45-60, 45-72, 60-72, 60-90, or 72-90 base pairs in length. In some embodiments, the IND is about 150 to about 450 base pairs in length. In some embodiments, the IND is about 105 to about 145 base pairs in length. In some embodiments, the IND is about 300 to about 3000 base pairs in length. In some embodiments, the IND is more than about 3000 base pairs in length. In some embodiments, the IND is 3000 to 5000 base pairs in length. In some embodiments, the IND is more than 5000 base pairs in length.

[0174] In some embodiments, the double-stranded target DNA is a double-stranded target gene or a part of a double-stranded target gene, and the IND comprises a part of a coding sequence of the target gene. In some embodiments, the IND comprises a part of a non-coding sequence of the target gene. In some embodiments, the IND comprises a part of an exon. In some embodiments, the IND comprises an entire exon. In some embodiments, the IND comprises a part of an intron. In some embodiments, the IND comprises an entire intron. In some embodiments, the IND comprises a 3′ UTR sequence of the target gene. In some embodiments, the IND comprises a 5′ UTR sequence of the target gene. In some embodiments, the IND comprises a whole or a part of an ORF of the target gene. In some embodiments, the IND comprises both coding and non-coding sequences of the target gene. In some embodiments, the IND comprises both intron and exon sequences of the target gene. For example, in some embodiments, the IND comprises the sequence of an exon flanked by an intronic sequence at the 5′ end, the 3′ end, or both ends. In some embodiments, the IND comprises one or more exons and intervening introns. In some embodiments, the IND comprises two or more exons and intervening introns. In some embodiments, the IND comprises all of the coding regions of a target gene, regulatory sequences of a target gene, or the entire target gene comprising its exons, introns and regulatory sequences. In some embodiments, the double-stranded DNA comprises a gene or a part of a gene, and the IND comprises one or more mutations compared to a wild-type reference sequence of the same gene. In some embodiments, the one or more mutations are associated with a disease. In some embodiments, the IND comprises an array of three nucleotide repeats (or tri-nucleotide repeats). In some embodiments, the IND comprises an array of tri-nucleotide repeats, wherein the number of the tri-nucleotide repeats is associated with a disease. As used herein, an array of tri-nucleotide repeats means at least two tri-nucleotides that are the same. In some embodiments, an array of tri-nucleotide repeats comprises at least 10, 20, 30, 50, 100, 150, 200, 250, 300, 350, 400, 450, 500, 550, 600, 650, 700, 750, 800, 850, 900, 950, 1000, 1050, 1100, 1150, 1200, 1250, 1300, 1350, 1400, 1450, or 1500 repeats of the same tri-nucleotides. In some embodiments, an array of tri-nucleotide repeats comprises at least 34 tri-nucleotide repeats. In some embodiments, an array of tri-nucleotide repeats comprises at least 44 tri-nucleotide repeats. In some embodiments, an array of tri-nucleotide repeats comprises at least 50 tri-nucleotide repeats. In some embodiments, an array of tri-nucleotide repeats comprises at least 65 tri-nucleotide repeats. In some embodiments, an array of tri-nucleotide repeats comprises at least 100 tri-nucleotide repeats. In some embodiments, an array of tri-nucleotide repeats comprises at least 1000 tri-nucleotide repeats. In some embodiments, an array of tri-nucleotide repeats is in a non-coding region of a gene, e.g., intron 1 of a FXN gene. In some embodiments, the array of tri-nucleotide repeats is an array of GAA (or the reverse complement TTC) repeats.

[0175] In some embodiments, a first PEgRNA comprises a first primer binding site (PBS) that is complementary to a free 3′ end of the second strand of the double-stranded target DNA formed at the first nick site. In some embodiments, the first PBS anneals with the free 3′ end formed at the first nick site, and the first prime editor initiates DNA synthesis from the first nick site, using the free 3′ end at the first nick site as a primer. In some embodiments, the first prime editor synthesizes a first new single-stranded DNA encoded by the first editing template of the first PEgRNA. In some embodiments, the second PEgRNA comprises a second PBS that is complementary to a free 3′ end of the first strand of the double-stranded target DNA formed at the second nick site. In some embodiments, the second PBS anneals with the free 3′ end formed at the second nick site, and the second prime editor initiates DNA synthesis from the nick site, using the free 3′ end at the second nick site as a primer. In some embodiments, the second prime editor synthesizes a second newly synthesized single-stranded DNA encoded by a second editing template of the second PEgRNA.

[0176] In some embodiments, the first editing template further comprises a region of complementarity to a sequence on the second strand of the IND that is upstream of the tri-nucleotide repeats, e.g., the GAA repeats in the target FXN gene. In some embodiments, the first editing template further comprises a region of complementarity to a sequence on the second strand of the IND that is downstream of the tri-nucleotide repeats, e.g., the GAA repeats in the target FXN gene.

[0177] In some embodiments, the second editing template further comprises a region of complementarity to a sequence on the first strand of the IND that is upstream of the tri-nucleotide repeats, e.g., the GAA repeats in the target FXN gene. In some embodiments, the second editing template further comprises a region of complementarity to a sequence on the first strand of the IND that is downstream of the tri-nucleotide repeats, e.g., the GAA repeats in the target FXN gene.

[0178] In some embodiments, through DNA repair, the sequence of the first newly synthesized single-stranded DNA encoded by the first editing template and/or the sequence of the second newly synthesized single-stranded DNA encoded by the second editing template is incorporated into the double-stranded target DNA, e.g., a target gene, thereby incorporating one or more intended nucleotide edits in the double-stranded target DNA, e.g., the target gene.

[0179] As used herein, a “nucleotide edit” or an “intended nucleotide edit” refers to a specified edit of a double-stranded target DNA. A nucleotide edit or intended nucleotide edit refers to a (i) deletion of one or more contiguous nucleotides at one specific position, (ii) insertion of one or more contiguous nucleotides at one specific position, (iii) substitution of one or more contiguous nucleotides, or (iv) a combination of contiguous nucleotide substitutions, insertions and/or deletions of two or more contiguous nucleotides at one specific position, or other alterations at one specific position to be incorporated into the sequence of the double-stranded target DNA. An intended nucleotide edit may refer to the edit on an editing template (e.g., a first editing template or a second editing template) as compared to the sequence of the double-stranded target gene, or may refer to the edit encoded by an editing template in the newly synthesized single-stranded DNA that is incorporated in the double-stranded target DNA, e.g., the FXN gene, as compared to endogenous sequence of the double-stranded target DNA, e.g., the FXN gene.

[0180] In some embodiments, an intended nucleotide edit may also refer to the edit that results from incorporation of the newly synthesized DNA encoded by an editing template, or incorporation of the two newly synthesized single-stranded DNA encoded by each of the first PEgRNA and the second PEgRNA in dual prime editing.

[0181] Four classes of alleles are recognized for the GAA repeat sequence in intron 1 of FXN: a normal allele, a mutable normal allele, borderline allele, and full penetrance allele. A nucleotide edit can make a specified edit to any of these classes of alleles. For example, in some embodiments, the target FAN gene has a mutable normal allele (premutation allele), and the IND includes 34-65 GAA repeats. In some embodiments, the target FXN gene has a full penetrance allele, and the IND includes at least 66 GAA repeats. In some embodiments, the target FXN gene has a borderline allele, and the IND includes 44-66 GAA repeats.

[0182] In some embodiments, the sequence of the first newly synthesized single-stranded DNA and/or the sequence of the second newly synthesized single-stranded DNA are incorporated into the double-stranded target DNA, e.g., the target gene. In some embodiments, the first and/or the second newly synthesized single-stranded DNAs comprises one or more intended nucleotide edits compared to the endogenous sequence of the double-stranded target DNA, which are incorporated in the double-stranded target DNA, e.g., the target gene. In some embodiments, the sequence of the first newly synthesized single-stranded DNA encoded by the first editing template is incorporated in the double-stranded target DNA, thereby incorporating one or more intended nucleotide edits in the double-stranded target DNA, e.g., the target gene. In some embodiments, the sequence of the second newly synthesized single-stranded DNA encoded by the second editing template is incorporated in the double-stranded target DNA, thereby incorporating one or more intended nucleotide edits in the double-stranded target DNA, e.g., the target gene. In some embodiments, the sequence of the first newly synthesized single-stranded DNA encoded by the first editing template and the sequence of the second newly synthesized single-stranded DNA encoded by the second editing template are incorporated in the double-stranded target DNA, thereby incorporating one or more intended nucleotide edits in the double-stranded target DNA, e.g., the target gene.

[0183] In some embodiments, the intended nucleotide edit comprises an insertion, deletion, nucleotide substitution, inversion, or any combination thereof compared to the endogenous sequence of the double-stranded target DNA, e.g., the target gene. In some embodiments, the intended nucleotide edit comprises 1, 2, 3, 4, 5, 6, 7, 8, 9, 10, 11, 12, 13, 14, 15, 16, 17, 18, 19, 20 or more nucleotide substitutions compared to the endogenous sequence of the double-stranded target DNA, e.g., the target gene. In some embodiments, the intended nucleotide edit comprises up to 5, up to 10, up to 15, up to 20, up to 25, up to 30, up to 40, or up to 50 nucleotide substitutions compared to the endogenous sequence of the double-stranded target DNA, e.g., the target gene. In some embodiments, the intended nucleotide edit comprises 1-50, 1-40, 1-30, 1-25, 1-20, 1-15, 1-10, or 1-5 nucleotide substitutions compared to the endogenous sequence of the double-stranded target DNA, e.g., the target gene. In some embodiments, the intended nucleotide edit comprises 3-50, 3-40, 3-30, 3-25, 3-20, 3-15, 3-10, or 3-5 nucleotide substitutions compared to the endogenous sequence of the double-stranded target DNA, e.g., the target gene. In some embodiments, the intended nucleotide edit comprises 5-50, 5-40, 5-30, 5-25, 5-20, 5-15, or 5-10 nucleotide substitutions compared to the endogenous sequence of the double-stranded target DNA, e.g., the target gene.

[0184] In some embodiments, the intended nucleotide edit comprises 1, 2, 3, 4, 5, 6, 7, 8, 9, 10, 11, 12, 13, 14, 15, 16, 17, 18, 19, 20 or more nucleotide insertions compared to the endogenous sequence of the double-stranded target DNA, e.g., the target gene. In some embodiments, the intended nucleotide edit comprises up to 5, up to 10, up to 15, up to 20, up to 25, up to 30, up to 40, or up to 50 nucleotide insertions compared to the endogenous sequence of the double-stranded target DNA, e.g., the target gene. In some embodiments, the intended nucleotide edit comprises single nucleotide insertions at 1, 2, 3, 4, 5, 6, 7, 8, 9, 10, 11, 12, 13, 14, 15, 16, 17, 18, 19, 20 or more sites in the double-stranded target DNA compared to the endogenous sequence of the double-stranded target DNA, e.g., the target gene. In some embodiments, the intended nucleotide edit comprises nucleotide insertions of greater than one nucleotide at each site in the double-stranded target DNA compared to the endogenous sequence of the double-stranded target DNA, e.g., the target gene. As used herein, “site” refers to a specific position in the sequence of a target DNA, e.g., a target gene. In some embodiments, the specific position in the sequence of the double-stranded target DNA, e.g., a target gene, can be referred to by specific positions in a reference sequence, e.g., a wild-type gene sequence. In some embodiments, a nucleotide insertion at position x refers to insertion of one or more nucleotides between position x and position x+1 as set forth by numbering in a reference sequence. In some embodiments, a nucleotide deletion at position x refers to deletion of the specific nucleotide at position x as set forth by numbering in a reference sequence. In some embodiments, a nucleotide deletion of positions x to x+n refers to deletion of the specific nucleotides starting at nucleotide x to nucleotide x+n, including nucleotide x and nucleotide x+n, as set forth by numbering in a reference sequence. In some embodiments, a nucleotide inversion of positions x to x+n refers to inversion of the specific nucleotides starting at nucleotide x to nucleotide x+n, including nucleotide x and nucleotide x+n, as set forth by numbering in a reference sequence.

[0185] In some embodiments, the intended nucleotide edit comprises nucleotide insertions of greater than one nucleotide at 1, 2, 3, 4, 5, 6, 7, 8, 9, 10, 11, 12, 13, 14, 15, 16, 17, 18, 19, 20 or more sites in the double-stranded target DNA compared to the endogenous sequence of the double-stranded target DNA, e.g., the target gene. In some embodiments, the intended nucleotide edit comprises 1-3000, 1-2500, 1-2000, 1-1500, 1-1000, 1-900, 1-800, 1-700, 1-600, 1-500, 1-400, 1-300, 1-200, 1-100, 1-50, 1-40, 1-30, 1-25, 1-20, 1-15, 1-10, or 1-5 nucleotide insertions compared to the endogenous sequence of the double-stranded target DNA, e.g., the target gene. In some embodiments, the intended nucleotide edit comprises 500-3000, 500-2500, 500-2000, 500-1500, 500-1000, 500-900, 500-800, 500-700, or 500-600 nucleotide insertions compared to the endogenous sequence of the double-stranded target DNA, e.g., the target gene. In some embodiments, the intended nucleotide edit comprises 30-300, 30-250, 30-200, 30-150, 30-100, 30-75, 30-50, 50-200, 50-150, 50-100, 50-75, 75-100, 75-150, 75-200, 75-250, or 75-300 nucleotide insertions compared to the endogenous sequence of the double-stranded target DNA, e.g., the target gene. In some embodiments, the intended nucleotide edit comprises nucleotide insertions of 1-3000, 1-2500, 1-2000, 1-1500, 1-1000, 1-900, 1-800, 1-700, 1-600, 1-500, 1-400, 1-300, 1-200, 1-100, 1-50, 1-40, 1-30, 1-25, 1-20, 1-15, 1-10, 1-5, 500-3000, 500-2500, 500-2000, 500-1500, 500-1000, 500-900, 500-800, 500-700, 500-600, 30-300, 30-250, 30-200, 30-150, 30-100, 30-75, 30-50, 50-200, 50-150, 50-100, 50-75, 75-100, 75-150, 75-200, 75-250, or 75-300 nucleotides at each site in the double-stranded target DNA compared to the endogenous sequence of the double-stranded target DNA, e.g., the target gene.

[0186] In some embodiments, the intended nucleotide edit comprises 1, 2, 3, 4, 5, 6, 7, 8, 9, 10, 11, 12, 13, 14, 15, 16, 17, 18, 19, 20 or more nucleotide deletions compared to the endogenous sequence of the double-stranded target DNA, e.g., the target gene. In some embodiments, the intended nucleotide edit comprises up to 5, up to 10, up to 15, up to 20, up to 25, up to 30, up to 40, or up to 50 nucleotide deletions compared to the endogenous sequence of the double-stranded target DNA, e.g., the target gene. In some embodiments, the intended nucleotide edit comprises single nucleotide deletions at 1, 2, 3, 4, 5, 6, 7, 8, 9, 10, 11, 12, 13, 14, 15, 16, 17, 18, 19, 20 or more sites in the double-stranded target DNA compared to the endogenous sequence of the double-stranded target DNA, e.g., the target gene. In some embodiments, the intended nucleotide edit comprises nucleotide deletions of greater than one nucleotide at each site in the double-stranded target DNA compared to the endogenous sequence of the double-stranded target DNA, e.g., the target gene. In some embodiments, the intended nucleotide edit comprises nucleotide deletions of greater than one nucleotide at 1, 2, 3, 4, 5, 6, 7, 8, 9, 10, 11, 12, 13, 14, 15, 16, 17, 18, 19, 20 or more sites in the double-stranded target DNA compared to the endogenous sequence of the double-stranded target DNA, e.g., the target gene. In some embodiments, the intended nucleotide edit comprises 1-3000, 1-2500, 1-2000, 1-1500, 1-1000, 1-900, 1-800, 1-700, 1-600, 1-500, 1-400, 1-300, 1-200, 1-100, 1-50, 1-40, 1-30, 1-25, 1-20, 1-15, 1-10, or 1-5 nucleotide deletions compared to the endogenous sequence of the double-stranded target DNA, e.g., the target gene. In some embodiments, the intended nucleotide edit comprises 500-3000, 500-2500, 500-2000, 500-1500, 500-1000, 500-900, 500-800, 500-700, or 500-600 nucleotide deletions compared to the endogenous sequence of the double-stranded target DNA, e.g., the target gene. In some embodiments, the intended nucleotide edit comprises 30-300, 30-250, 30-200, 30-150, 30-100, 30-75, 30-50, 50-200, 50-150, 50-100, 50-75, 75-100, 75-150, 75-200, 75-250, 75-300 nucleotide deletions compared to the endogenous sequence of the double-stranded target DNA, e.g., the target gene. In some embodiments, the intended nucleotide edit comprises deletion of about 105-145 nucleotides at a site of the target gene, e.g., the FXN gene. In some embodiments, the intended nucleotide edit comprises deletion of about 150-450 nucleotides at a site of the target gene, e.g., the FXN gene. In some embodiments, the intended nucleotide edit comprises deletion of about 300-3000 nucleotides at a site of the target gene, e.g., the FXN gene. In some embodiments, the intended nucleotide edit comprises deletion of more than about 3000 nucleotides at a site of the target gene, e.g., the FXN gene.

[0187] In some embodiments, the intended nucleotide edit comprises 1-3, 1-6, 1-9, 1-12, 1-15, 1-18, 1-21, 1-24, 1-27, 1-30, 1-36, 1-45, 1-60, 1-72, 1-90, 3-6, 3-9, 3-12, 3-15, 3-18, 3-21, 3-24, 3-27, 3-30, 3-36, 3-45, 3-60, 3-72, 3-90, 6-9, 6-12, 6-15, 6-18, 6-21, 6-24, 6-27, 6-30, 6-36, 6-45, 6-60, 6-72, 6-90, 9-12, 9-15, 9-18, 9-21, 9-24, 9-27, 9-30, 9-36, 9-45, 9-60, 9-72, 9-90, 12-15, 12-18, 12-21, 12-24, 12-27, 12-30, 12-36, 12-45, 12-60, 12-72, 12-90, 15-18, 15-21, 15-24, 15-27, 15-30, 15-36, 15-45, 15-60, 15-72, 15-90, 18-21, 18-24, 18-27, 18-30, 18-36, 18-45, 18-60, 18-72, 18-90, 21-24, 21-27, 21-30, 21-36, 21-45, 21-60, 21-72, 21-90, 24-27, 24-30, 24-36, 24-45, 24-60, 24-72, 24-90, 27-30, 27-36, 27-45, 27-60, 27-72, 27-90, 30-36, 30-45, 30-60, 30-72, 30-90, 45-60, 45-72, 60-72, 60-90, or 72-90 nucleotide deletions compared to the endogenous sequence of the double-stranded target DNA, e.g., the target gene. In some embodiments, the intended nucleotide edit comprises nucleotide deletions of 1-3000, 1-2500, 1-2000, 1-1500, 1-1000, 1-900, 1-800, 1-700, 1-600, 1-500, 1-400, 1-300, 1-200, 1-100, 1-50, 1-40, 1-30, 1-25, 1-20, 1-15, 1-10, 1-5, 500-3000, 500-2500, 500-2000, 500-1500, 500-1000, 500-900, 500-800, 500-700, 500-600, 30-300, 30-250, 30-200, 30-150, 30-100, 30-75, 30-50, 50-200, 50-150, 50-100, 50-75, 75-100, 75-150, 75-200, 75-250, or 75-300 nucleotides at each site in the double-stranded target DNA compared to the endogenous sequence of the double-stranded target DNA, e.g., the target gene. In some embodiments, the intended nucleotide edit comprises nucleotide deletions of 1-3, 1-6, 1-9, 1-12, 1-15, 1-18, 1-21, 1-24, 1-27, 1-30, 1-36, 1-45, 1-60, 1-72, 1-90, 3-6, 3-9, 3-12, 3-15, 3-18, 3-21, 3-24, 3-27, 3-30, 3-36, 3-45, 3-60, 3-72, 3-90, 6-9, 6-12, 6-15, 6-18, 6-21, 6-24, 6-27, 6-30, 6-36, 6-45, 6-60, 6-72, 6-90, 9-12, 9-15, 9-18, 9-21, 9-24, 9-27, 9-30, 9-36, 9-45, 9-60, 9-72, 9-90, 12-15, 12-18, 12-21, 12-24, 12-27, 12-30, 12-36, 12-45, 12-60, 12-72, 12-90, 15-18, 15-21, 15-24, 15-27, 15-30, 15-36, 15-45, 15-60, 15-72, 15-90, 18-21, 18-24, 18-27, 18-30, 18-36, 18-45, 18-60, 18-72, 18-90, 21-24, 21-27, 21-30, 21-36, 21-45, 21-60, 21-72, 21-90, 24-27, 24-30, 24-36, 24-45, 24-60, 24-72, 24-90, 27-30, 27-36, 27-45, 27-60, 27-72, 27-90, 30-36, 30-45, 30-60, 30-72, 30-90, 45-60, 45-72, 60-72, 60-90, or 72-90 nucleotides at each site in the double-stranded target DNA compared to the endogenous sequence of the double-stranded target DNA, e.g., the target gene.

[0188] In some embodiments, the intended nucleotide edits, e.g., nucleotide substitutions, insertions, or deletions, are in consecutive or contiguous nucleotides in the double-stranded target DNA sequence compared to the endogenous sequence of the double-stranded target DNA, e.g., the target gene. In some embodiments, the intended nucleotide edits, e.g., nucleotide substitutions, insertions, or deletions are in non-consecutive or non-contiguous nucleotides in the double-stranded target DNA sequence compared to the endogenous sequence of the double-stranded target DNA, e.g., the target gene.

[0189] In some embodiments, the intended nucleotide edit comprises an inversion as compared to the endogenous sequence of the double-stranded target DNA, e.g., the target gene. In some embodiments, a segment of 2, 3, 4, 5, 6, 7, 8, 9, 10, 20, 30, 40, 50, 60, 70, 80, 90, 100, 110, 120, 130, 140, 150, 200, 250, 300 or more nucleotides of the endogenous sequence of the double-stranded target DNA is inverted. In some embodiments, a segment of 1-50, 1-40, 1-30, 1-25, 1-20, 1-15, 1-10, or 1-5 nucleotides of the endogenous sequence of the double-stranded target DNA is inverted. In some embodiments, a segment of 3-50, 3-40, 3-30, 3-25, 3-20, 3-15, 3-10, 3-5, 5-50, 5-40, 5-30, 5-25, 5-20, 5-15, or 5-10 nucleotides of the endogenous sequence of the double-stranded target DNA is inverted.

[0190] In some embodiments, the intended nucleotide edit comprises more than one nucleotide edit in the double-stranded target DNA sequence compared to the endogenous sequence of the double-stranded target DNA, e.g., the target gene. In some embodiments, the intended nucleotide edit comprises a combination of one or more of nucleotide substitutions, one or more of nucleotide insertions, one or more of nucleotide deletions and one or more of nucleotide inversions compared to the endogenous sequence of the double-stranded target DNA, e.g., the target gene. In some embodiments, the intended nucleotide edit comprises one or more nucleotide substitutions and one or more nucleotide insertions. In some embodiments, the intended nucleotide edit comprises one or more nucleotide substitutions and one or more nucleotide deletions. In some embodiments, the intended nucleotide edit comprises one or more nucleotide substitutions and one or more nucleotide inversions. In some embodiments, the intended nucleotide edit comprises one or more nucleotide insertions and one or more nucleotide deletions. In some embodiments, the intended nucleotide edit comprises one or more nucleotide insertions and one or more nucleotide inversions. In some embodiments, the intended nucleotide edit comprises one or more nucleotide deletions and one or more nucleotide inversions. In some embodiments, the intended nucleotide edit comprises one or more nucleotide substitutions, one or more nucleotide insertions and one or more nucleotide deletions. In some embodiments, the intended nucleotide edit comprises one or more nucleotide substitutions, one or more nucleotide insertions and one or more nucleotide inversions. In some embodiments, the intended nucleotide edit comprises one or more nucleotide substitutions, one or more nucleotide deletions and one or more nucleotide inversions. In some embodiments, the intended nucleotide edit comprises one or more nucleotide insertions, one or more nucleotide deletions and one or more nucleotide inversions. In some embodiments, the intended nucleotide edit comprises one or more nucleotide substitutions, one or more nucleotide insertions, one or more nucleotide deletions and one or more nucleotide inversions.

[0191] In some embodiments, the first newly synthesized single-stranded DNA and the second newly synthesized single-stranded DNA have a region of complementarity to each other. In some embodiments, the first newly synthesized single-stranded DNA has a region of complementarity to an endogenous sequence of the double-stranded target DNA, e.g., the target gene, adjacent to or near a nick site. In some embodiments, the first newly synthesized single-stranded DNA has a region of complementarity to an endogenous sequence of the double-stranded target DNA, e.g., the target gene, on the first strand adjacent to the second nick site. In some embodiments, the first newly synthesized single-stranded DNA has a region of complementarity to an endogenous sequence of the double-stranded target DNA, e.g., the target gene, on the first strand adjacent to and downstream of the second nick site. In some embodiments, the first newly synthesized single-stranded DNA has a region of identity to an endogenous sequence of the double-stranded target DNA, e.g., the target gene, on the second strand adjacent to and downstream of the first nick site. In some embodiments, the first newly synthesized single-stranded DNA has a region of identity to an endogenous sequence of the double-stranded target on the second strand adjacent to and upstream of the second nick site.

[0192] In some embodiments, the second newly synthesized single-stranded DNA has a region of complementarity to an endogenous sequence of the double-stranded target DNA, e.g., the target gene, adjacent to or near a nick site. In some embodiments, the second newly synthesized single-stranded DNA has a region of complementarity to an endogenous sequence of the double-stranded target DNA, e.g., the target gene, on the second strand adjacent to the first nick site. In some embodiments, the second newly synthesized single-stranded DNA has a region of complementarity to an endogenous sequence of the double-stranded target DNA, e.g., the target gene, on the second strand adjacent to and downstream of the first nick site. In some embodiments, the second newly synthesized single-stranded DNA has a region of identity to an endogenous sequence of the double-stranded target DNA, e.g., the target gene, on the first strand adjacent to and upstream of the second nick site.

[0193] As used herein, reference for positioning in a chromosome or a double-stranded polynucleotide, e.g., a double-stranded target DNA, includes the position on either strand of the two strands, unless otherwise specified. For example, a position of a first nick site may be used refer to the first nick site on the first edit strand and/or the corresponding position on the second edit strand.

[0194] By “upstream” and “downstream” it is intended to define relative positions of at least two nucleotides, regions, or sequences in a nucleic acid molecule oriented in a 5′-to-3′ direction. For example, a first nucleotide is upstream of a second nucleotide when the first nucleotide is 5′ to the second nucleotide. A first sequence is upstream of a second sequence in a DNA molecule where the first sequence is positioned 5′ to the second sequence. Accordingly, the second sequence is downstream, that is, 3′, of the first sequence. In some embodiments, each of the first newly synthesized single-stranded DNA and the second newly synthesized single-stranded DNA has a region of complementarity to an endogenous sequence of the double-stranded target DNA, e.g., the target gene, adjacent to or near a nick site. In some embodiments, each of the first newly synthesized single-stranded DNA and the second newly synthesized single-stranded DNA has a region of identity to an endogenous sequence of the double-stranded target DNA, e.g., the target gene, adjacent to or near a nick site. In some embodiments, the first newly synthesized single-stranded DNA has a region of complementarity to an endogenous sequence of the double-stranded target DNA, e.g., the target gene, on the first strand adjacent to and upstream of the second nick site, and the second newly synthesized single-stranded DNA has a region of complementarity to an endogenous sequence of the double-stranded target DNA, e.g., the target gene, on the second strand adjacent to and upstream of the first nick site. In some embodiments, the first newly synthesized single-stranded DNA has a region of identity to an endogenous sequence of the double-stranded target DNA on the second strand adjacent to and downstream of the first nick site and/or a region of identity to an endogenous sequence of the double-stranded target DNA on the second strand adjacent to and downstream of the position corresponding to the second nick site, and the second newly synthesized single-stranded DNA has a region of identity to an endogenous sequence of the double-stranded target DNA on the first strand adjacent to and downstream of the first nick site and/or a region of identity to an endogenous sequence of the double-stranded target DNA on the first strand adjacent to and downstream of the position corresponding to the first nick site.

[0195] In some embodiments, the first newly synthesized single-stranded DNA encoded by the first editing template and the second newly synthesized single-stranded DNA encoded by the second editing template have a region of complementarity to each other. The complementary region between the first newly synthesized single-stranded DNA and the second newly synthesized single-stranded DNA may be referred to as an overlap duplex (OD).

[0196] In some embodiments, the first newly synthesized single-stranded DNA encoded by the first editing template and the second newly synthesized single-stranded DNA encoded by the second editing template are complementary or substantially complementary to each other. In some embodiments, the OD is incorporated in the double-stranded target DNA, e.g., the target gene, thereby incorporating one or more intended nucleotide edits encoded by the first editing template and the second editing template into the double-stranded target DNA, e.g., the target gene. In some embodiments, the OD replaces all or a portion of the IND, thereby incorporating one or more intended nucleotide edits in the double-stranded target DNA, e.g., the target gene. In some embodiments, the IND is excised or degraded, and the OD is incorporated at the place of the IND excision, followed by ligation of the nicks on both strands of the double-stranded target DNA, e.g., the target gene, thereby incorporating the one or more intended nucleotide edits in the double-stranded target DNA. In some embodiments, the sequence of the OD comprises partial identity compared to the sequence of the IND. In some embodiments, the sequence of the OD comprises no identity compared to the sequence of the IND. In some embodiments, the sequence of the OD comprises a sequence exogenous to the double-stranded target DNA. In some embodiments, incorporation of the OD does not alter the reading frame of the double-stranded target DNA. In some embodiments, incorporation of the OD results in a different, e.g., reduced number of nucleic acid repeats as compared to the nucleic acid repeats encoded by the IND, but does not alter the amino acid sequences encoded by the double-stranded DNA, outside of the tri-nucleotide repeat region.

[0197] In some embodiments, the first editing template and the second editing template comprise a region of complementarity or substantial complementarity to each other, and do not have complementarity to either strand of the double-stranded target DNA, e.g., the target gene. Accordingly, in some embodiments, the first newly synthesized single-stranded DNA encoded by the first editing template and the second newly synthesized single-stranded DNA encoded by the second editing template can anneal to each other to form an OD that does not have nucleotide sequence identity with the endogenous sequence of double-stranded target DNA, e.g., the target gene. In some embodiments, the sequence of the OD comprises a sequence exogenous to the double-stranded target DNA, e.g., the target gene. In some embodiments, the sequence of the OD consists of a sequence exogenous to the double-stranded target DNA, e.g., the target gene. In some embodiments, the IND is excised, and the OD is incorporated at the place of the IND excision, followed by ligation of the nicks on both strands of the target DNA, thereby incorporating the sequence of the OD in the double-stranded target DNA.

[0198] In some embodiments, the OD comprises 1, 2, 3, 4, 5, 6, 7, 8, 9, 10, 11, 12, 13, 14, 15, 16, 17, 18, 19, 20, 21, 22, 23, 24, 25, 30, 35, 40, 45, 50 or more contiguous complementary or substantially complementary base pairs. In some embodiments, the OD comprises about 5 to 10, 5 to 15, 5 to 20, 5 to 25, 5 to 30, 5 to 35, 5 to 40, 5 to 45, 5 to 50, 5 to 55, 5 to 60, 5 to 65, 5 to 70, 5 to 75, 5 to 80, 5 to 85, 5 to 90, 5 to 95, 5 to 100, 5 to 110, 5 to 120, 5 to 130, 5 to 140, 5 to 150, 15 to 20, 15 to 25, 15 to 30, 15 to 35, 15 to 40, 15 to 45, 15 to 50, 15 to 55, 15 to 60, 15 to 65, 15 to 70, 15 to 75, 15 to 80, 15 to 85, 15 to 90, 15 to 95, 15 to 100, 15 to 110, 15 to 120, 15 to 130, 15 to 140, 15 to 150, 25 to 30, 25 to 35, 25 to 40, 25 to 45, 25 to 50, 25 to 55, 25 to 60, 25 to 65, 25 to 70, 25 to 75, 25 to 80, 25 to 85, 25 to 90, 25 to 95, 25 to 100, 25 to 110, 25 to 120, 25 to 130, 25 to 140, 25 to 150, 35 to 40, 35 to 45, 35 to 50, 35 to 55, 35 to 60, 35 to 65, 35 to 70, 35 to 75, 35 to 80, 35 to 85, 35 to 90, 35 to 95, 35 to 100, 35 to 110, 35 to 120, 35 to 130, 35 to 140, 35 to 150, 45 to 50, 45 to 55, 45 to 60, 45 to 65, 45 to 70, 45 to 75, 45 to 80, 45 to 85, 45 to 90, 45 to 95, 45 to 100, 45 to 110, 45 to 120, 45 to 130, 45 to 140, o45 to 150, 55 to 60, 55 to 65, 55 to 70, 55 to 75, 55 to 80, 55 to 85, 55 to 90, 55 to 95, 55 to 100, 55 to 110, 55 to 120, 55 to 130, 55 to 140, 55 to 150, 65 to 70, 65 to 75, 65 to 80, 65 to 85, 65 to 90, 65 to 95, 65 to 100, 65 to 110, 65 to 120, 65 to 130, 65 to 140, 65 to 150, 75 to 80, 75 to 85, 75 to 90, 75 to 95, 75 to 100, 75 to 110, 75 to 120, 75 to 130, 75 to 140, 75 to 150, 85 to 90, 85 to 95, 85 to 100, 85 to 110, 85 to 120, 85 to 130, 85 to 140, 85 to 150, 95 to 100, 95 to 110, 95 to 120, 95 to 130, 95 to 140, 95 to 150, 105 to 110, 105 to 120, 105 to 130, 105 to 140, 105 to 150, 115 to 120, 115 to 130, 115 to 140, 115 to 150, 125 to 130, 125 to 140, 125 to 150, 135 to 140, 135 to 150, or 145 to 150 contiguous complementary or substantially complementary base pairs. In some embodiments, the OD comprise 10, 11, 12, 13, 14, 15, 16, 17, 18, 19, 20, 21, 22, 23, 24 or 25 contiguous complementary or substantially complementary base pairs. In some embodiments, the OD comprise 30, 35, 40, 50, 60, 70, 80, 90, or 100 contiguous complementary or substantially complementary base pairs. In some embodiments, the OD comprise no greater than 20, 25, 30, 35, 40, 50, 60, 70, 80, 90, or 100 contiguous complementary or substantially complementary base pairs. In some embodiments, the OD comprises a sufficient number of contiguous complementary base pairs to form a sufficiently stable duplex for replacement of the IND. In some embodiments, the OD comprises at least 10 contiguous complementary or substantially complementary base pairs. In some embodiments, the OD comprises at least 15 contiguous complementary or substantially complementary base pairs. In some embodiments, the OD comprises about 20 contiguous complementary or substantially complementary base pairs.

[0199] In some embodiments, the OD contains about 20 to 40 contiguous complementary or substantially complementary base pairs. In some embodiments, the OD contains about 20, about 30, about 40, about 50, about 60, about 70, or about 80 contiguous complementary or substantially complementary base pairs. In some embodiments, the OD contains about 10 to 19 contiguous complementary or substantially complementary base pairs. In some embodiments, the OD contains about 20 to 30 contiguous complementary or substantially complementary base pairs. In some embodiments, the OD contains about 30 to 40 contiguous complementary or substantially complementary base pairs. In some embodiments, the OD contains at least 40 contiguous complementary or substantially complementary base pairs. In some embodiments, the OD consists of about 20 to 40 contiguous complementary or substantially complementary base pairs. In some embodiments, the OD consists of about 20, about 30, about 40, about 50, about 60, about 70, or about 80 contiguous complementary or substantially complementary base pairs. In some embodiments, the OD consists of about 10 to 19 contiguous complementary or substantially complementary base pairs. In some embodiments, the OD consists of about 20 to 30 contiguous complementary or substantially complementary base pairs. In some embodiments, the OD consists of about 30 to 40 contiguous complementary or substantially complementary base pairs. In some embodiments, the OD consists of 23, 38, 53, 68, or 83 contiguous complementary or substantially complementary base pairs. In some embodiments, the OD consists of 38 contiguous complementary or substantially complementary base pairs.

[0200] The sequence of the OD can comprises any exogenous sequence or any endogenous sequence of the FXN gene. The GC content of the OD may vary. In some embodiments, the GC content of the OD is less than about 45%. In some embodiments, the GC content of the OD is about 45%-60%. In some embodiments, the GC content of the OD is about 60%-75%. In some embodiments, the GC content of the OD is at least about 75%. In some embodiments, the GC content of the OD is about 40%-80%. In some embodiments, the GC content of the OD is about 50%-60%. In some embodiments, the GC content of the OD is about 60%-80%. In some embodiments, the GC content of the OD is about 60%-70%. In some embodiments, the GC content of the OD is about 70%-80%. In some embodiments, the GC content of the OD is about 10%-20%, about 20%-30%, about 30%-40%, about 40%-50%, about 50%-60%, about 60%-70%, about 70%-80%, about 80%-90% or about 90%-100%. In some embodiments, the GC content of the OD is about 42%. In some embodiments, the GC content of the OD is about 53%. In some embodiments, the GC content of the OD is about 63%. In some embodiments, the GC content of the OD is about 71%. In some embodiments, the GC content of the OD is about 79%. In some embodiments, the GC content of the OD is about 63%.

[0201] In some embodiments, the OD replaces the IND of a target DNA, wherein the double-stranded target DNA is an entire target gene or is part of a target gene. In some embodiments, the OD replaces part of an exon or an entire exon, part of an intron or an entire intron, one or more exons and intervening introns, all of the coding regions of a target gene, regulatory sequences of a target gene, or the entire target gene comprising its exons, introns and regulatory sequences. In some embodiments, the OD comprises a region of identity to an endogenous sequence of the double-stranded target DNA. In some embodiments, the OD does not have sequence identity to an endogenous sequence of the double-stranded target DNA. In some embodiments, the OD is exogenous to the double-stranded target DNA, e.g., the target gene.

[0202] In some embodiments, the OD has a biological function or encodes a polypeptide having a biological function, or a portion thereof. In some embodiments, the OD comprises an expression cassette. In some embodiments, the OD comprises a nucleotide sequence that encodes an expression tag, for example, an affinity tag, a His tag, a V5 tag, or a FLAG tag. In some embodiments, the OD comprises a nucleotide sequence that encodes a His tag. In some embodiments, the OD comprises a nucleotide sequence that encodes a FLAG tag. In some embodiments, the OD comprises a nucleotide sequence that encodes an attB or an attP sequence. In some embodiments, the OD comprises a nucleotide sequence that encodes a reporter protein, for example, a green fluorescence protein, a blue fluorescence protein, a cyan fluorescence protein, a yellow fluorescence protein, an auto fluorescent protein, or a luciferase. In some embodiments, the OD comprises a recognition site of an enzyme, for example, a recombinase recognition sequence. In some embodiments, the OD comprises nucleotide sequence that encodes a selectable marker, for example, an antibiotic resistance marker. In some embodiments, the OD comprises a regulatory sequence, for example, a promoter, an enhancer, or an insulator. In some embodiments, the OD comprises a trackable sequence, for example, a barcode. In some embodiments, replacement of the IND by the OD restores or partially restores the function of the target gene. In some embodiments, the target gene is a disease-associated gene. In some embodiments, the target gene is a monogenic disease-associated gene. In some embodiments, the target gene is a polygenic disease-associated gene. In some embodiments, the target gene is a disease-associated gene containing one or more disease-causing mutations, wherein replacement of the IND by the OD corrects the mutations, thereby restoring or partially restoring the function of the target gene. In some embodiments, the disease-associated gene containing one or more disease-causing mutations is in a human subject in need of treatment. In some embodiments, the target gene is a mutated gene causing a disease or disorder in a human subject, wherein replacement of the IND by the OD corrects the mutated gene, thereby restoring or partially restoring the function of the target gene. In some embodiments, the target gene is a disease-associated gene containing one or more disease-causing mutations, wherein replacement of the IND by the OD modifies the target gene to restore or partially restore the function of the target gene. In some embodiments, the disease-associated gene containing one or more disease-causing mutations is in a human subject in need of treatment. In some embodiments, the target gene is a mutated gene causing a disease or disorder in a human subject, wherein replacement of the IND by the OD modifies the mutated gene to restore or partially restore the function of the target gene.

[0203] In some embodiments, the first editing template and/or the second editing template comprises a nucleotide sequence that encodes a polypeptide sequence that is the same as, or a portion of, the polypeptide sequence encoded by the IND, but does not have nucleotide sequence complementarity or identity to the sequence of the IND. In some embodiments, the second newly synthesized single-stranded DNA encoded by the second editing template comprises a nucleotide sequence that encodes a polypeptide sequence that is the same as, or a portion of, the polypeptide sequence encoded by the IND, but does not have substantial nucleotide sequence complementarity or identity to the sequence of the IND. Accordingly, in some embodiments, the OD comprises a sequence that encodes a polypeptide sequence that is the same as the polypeptide sequence or a portion of the same polypeptide sequence encoded by the IND, wherein the OD does not have substantial nucleotide sequence identity to the sequence of the IND.

[0204] In some embodiments, the first newly synthesized single-stranded DNA encoded by the first editing template and the second newly synthesized single-stranded DNA encoded by the second editing template comprises a region of complementarity with each other, and can anneal with each other to form an OD. In some embodiments, the first newly synthesized single-stranded DNA encoded by the first editing template further comprises a region that does not have complementarity with the second newly synthesized single-stranded DNA encoded by the second editing template (see exemplary schematic in FIG. 4B). In some embodiments, the second newly synthesized single-stranded DNA encoded by the second editing template further comprises a region that does not have complementarity with the first newly synthesized single-stranded DNA encoded by the first editing template. Accordingly, in some embodiments, the first newly synthesized single-stranded DNA encoded by the first editing template and the second newly synthesized single-stranded DNA encoded by the second editing template can anneal to each other through the partially complementary sequences to form an OD that is linked to a 5′ overhang and/or a 3′ overhang. In some embodiments, the IND is removed, the OD, along with the 5′ overhang and/or the 3′ overhang, is incorporated at the place of the IND excision in the double-stranded target DNA, e.g., the target gene. Through DNA repair, the gaps corresponding to the positions of the 5′ overhang and/or the 3′ overhangs are filled and ligated, thereby incorporating the one or more intended nucleotide edits in the double-stranded target DNA, e.g., the target gene.

[0205] Accordingly, in some embodiments, the IND is replaced by the sequence of (A+C), (B+C), or (A+B+C), wherein A is the region, and its complementary strand, of the first newly synthesized single-stranded DNA that is not complementary to the second newly synthesized single-stranded DNA, wherein B is the region, and its complementary strand, of the second newly synthesized single-stranded DNA that is not complementary to the first newly synthesized single-stranded DNA, and wherein C is the OD. The double-stranded sequence of (A+C), (B+C), or (A+B+C) that replaces the IND may be referred to as the “replacement duplex (RD)”.

[0206] Accordingly, in some embodiments, the RD comprises the OD. In some embodiments, as exemplified in FIG. 4A, the first editing template and the second editing template are substantially complementary to each other. Accordingly, in some embodiments, the OD comprises the entirety or substantially the entirety of the first newly synthesized single-stranded DNA encoded by the first editing template and the second newly synthesized single-stranded DNA encoded by the second editing template. In some embodiments, the RD consists of the OD. In some embodiments, as exemplified in FIG. 4B, the RD comprises the OD, the non-complementary region of the first newly synthesized DNA compared to the second newly synthesized DNA and complement thereof, and/or the non-complementary region of the second newly synthesized DNA compared to the first newly synthesized DNA and complement thereof.

[0207] In some embodiments, the RD comprises 1, 2, 3, 4, 5, 6, 7, 8, 9, 10, 11, 12, 13, 14, 15, 16, 17, 18, 19, 20, 21, 22, 23, 24, 25, 30, 35, 40, 45, 50, 60, 70, 80, 90, 100, 110, 120, 130, 140, 150, 160, 170, 180, 190, 200 or more base pairs. In some embodiments, the RD comprises about 5 to 10, 5 to 15, 5 to 20, 5 to 25, 5 to 30, 5 to 35, 5 to 40, 5 to 45, 5 to 50, 5 to 55, 5 to 60, 5 to 65, 5 to 70, 5 to 75, 5 to 80, 5 to 85, 5 to 90, 5 to 95, 5 to 100, 5 to 110, 5 to 120, 5 to 130, 5 to 140, 5 to 150, 5 to 175, 5 to 200, 5 to 225, 5 to 250, 5 to 275, 5 to 300, 5 to 325, 5 to 350, 5 to 375, 5 to 400, 5 to 425, 5 to 450, 5 to 475, 5 to 500, 10 to 15, 10 to 20, 10 to 25, 10 to 30, 10 to 35, 10 to 40, 10 to 45, 10 to 50, 10 to 55, 10 to 60, 10 to 65, 10 to 70, 10 to 75, 10 to 80, 10 to 85, 10 to 90, 10 to 95, 10 to 100, 10 to 110, 10 to 120, 10 to 130, 10 to 140, 10 to 150, 10 to 175, 10 to 200, 10 to 225, 10 to 250, 10 to 275, 10 to 300, 10 to 325, 10 to 350, 10 to 375, 10 to 400, 10 to 425, 10 to 450, 10 to 475, 10 to 500, 15 to 20, 15 to 25, 15 to 30, 15 to 35, 15 to 40, 15 to 45, 15 to 50, 15 to 55, 15 to 60, 15 to 65, 15 to 70, 15 to 75, 15 to 80, 15 to 85, 15 to 90, 15 to 95, 15 to 100, 15 to 110, 15 to 120, 15 to 130, 15 to 140, 15 to 150, 15 to 175, 15 to 200, 15 to 225, 15 to 250, 15 to 275, 15 to 300, 15 to 325, 15 to 350, 15 to 375, 15 to 400, 15 to 425, 15 to 450, 15 to 475, 15 to 500, 20 to 25, 20 to 30, 20 to 35, 20 to 40, 20 to 45, 20 to 50, 20 to 55, 20 to 60, 20 to 65, 20 to 70, 20 to 75, 20 to 80, 20 to 85, 20 to 90, 20 to 95, 20 to 100, 20 to 110, 20 to 120, 20 to 130, 20 to 140, 20 to 150, 20 to 175, 20 to 200, 20 to 225, 20 to 250, 20 to 275, 20 to 300, 20 to 325, 20 to 350, 20 to 375, 20 to 400, 20 to 425, 20 to 450, 20 to 475, 20 to 500, 30 to 35, 30 to 40, 30 to 45, 30 to 50, 30 to 55, 30 to 60, 30 to 65, 30 to 70, 30 to 75, 30 to 80, 30 to 85, 30 to 90, 30 to 95, 30 to 100, 30 to 110, 30 to 120, 30 to 130, 30 to 140, 30 to 150, 30 to 175, 30 to 200, 30 to 225, 30 to 250, 30 to 275, 30 to 300, 30 to 325, 30 to 350, 30 to 375, 30 to 400, 30 to 425, 30 to 450, 30 to 475, 30 to 500, 40 to 45, 40 to 50, 40 to 55, 40 to 60, 40 to 65, 40 to 70, 40 to 75, 40 to 80, 40 to 85, 40 to 90, 40 to 95, 40 to 100, 40 to 110, 40 to 120, 40 to 130, 40 to 140, 40 to 150, 40 to 175, 40 to 200, 40 to 225, 40 to 250, 40 to 275, 40 to 300, 40 to 325, 40 to 350, 40 to 375, 40 to 400, 40 to 425, 40 to 450, 40 to 475, 40 to 500, 50 to 55, 50 to 60, 50 to 65, 50 to 70, 50 to 75, 50 to 80, 50 to 85, 50 to 90, 50 to 95, 50 to 100, 50 to 110, 50 to 120, 50 to 130, 50 to 140, 50 to 150, 50 to 175, 50 to 200, 50 to 225, 50 to 250, 50 to 275, 50 to 300, 50 to 325, 50 to 350, 50 to 375, 50 to 400, 50 to 425, 50 to 450, 50 to 475, 50 to 500, 75 to 80, 75 to 85, 75 to 90, 75 to 95, 75 to 100, 75 to 110, 75 to 120, 75 to 130, 75 to 140, 75 to 150, 75 to 175, 75 to 200, 75 to 225, 75 to 250, 75 to 275, 75 to 300, 75 to 325, 75 to 350, 75 to 375, 75 to 400, 75 to 425, 75 to 450, 75 to 475, 75 to 500, 100 to 110, 100 to 120, 100 to 130, 100 to 140, 100 to 150, 100 to 175, 100 to 200, 100 to 225, 100 to 250, 100 to 275, 100 to 300, 100 to 325, 100 to 350, 100 to 375, 100 to 400, 100 to 425, 100 to 450, 100 to 475, 100 to 500, 125 to 150, 125 to 175, 125 to 200, 125 to 225, 125 to 250, 125 to 275, 125 to 300, 125 to 325, 125 to 350, 125 to 375, 125 to 400, 125 to 425, 125 to 450, 125 to 475, 125 to 500, 150 to 175, 150 to 200, 150 to 225, 150 to 250, 150 to 275, 150 to 300, 150 to 325, 150 to 350, 150 to 375, 150 to 400, 150 to 425, 150 to 450, 150 to 475, 150 to 500, 175 to 200, 175 to 225, 175 to 250, 175 to 275, 175 to 300, 175 to 325, 175 to 350, 175 to 375, 175 to 400, 175 to 425, 175 to 450, 175 to 475, 175 to 500, 200 to 250, 200 to 275, 200 to 300, 200 to 325, 200 to 350, 200 to 375, 200 to 400, 200 to 425, 200 to 450, 200 to 475, 200 to 500, 225 to 250, 225 to 275, 225 to 300, 225 to 325, 225 to 350, 225 to 375, 225 to 400, 225 to 425, 225 to 450, 225 to 475, 225 to 500, 250 to 275, 250 to 300, 275 to 300, 275 to 325, 275 to 350, 275 to 375, 275 to 400, 275 to 425, 275 to 450, 275 to 475, 275 to 500, 300 to 325, 300 to 350, 300 to 375, 300 to 400, 300 to 425, 300 to 450, 300 to 475, 300 to 500, 325 to 350, 325 to 375, 325 to 400, 325 to 425, 325 to 450, 325 to 475, 325 to 500, 350 to 375, 350 to 400, 350 to 425, 350 to 450, 350 to 475, 350 to 500, 375 to 400, 375 to 425, 375 to 450, 375 to 475, 375 to 500, 400 to 425, 400 to 450, 400 to 475, 400 to 500, 425 to 450, 425 to 475, 425 to 500, 450 to 475, 450 to 500, or 475 to 500 base pairs. In some embodiments, the RD comprise 13, 14, 15, 16, 17, 18, 19, 20, 21, 22, 23, 24, 25, 26, 27, 28, 29, 30, 31, 32, 33, 34, 35, 36, 37, 38, 39, 40, 41, 42, 43, 44, 45, 46, 47, 48, 49, or 50 base pairs. In some embodiments, the RD comprise at least 30, 35, 40, 50, 60, 70, 80, 90, 100, 110, 120, 130, 140, 150, 160, 170, 180, 190, 200, 210, 220, 230, 240, 250, 260, 270, 280, 290, 300, 310, 320, 330, 340, 350, 360, 370, 380, 390, 400, 410, 420, 430, 440, 450, 460, 470, 480, 490, or 500 base pairs. In some embodiments, the RD comprise no greater than 20, 25, 30, 35, 40, 50, 60, 70, 80, 90, 100, 110, 120, 130, 140, 150, 160, 170, 180, 190, 200, 210, 220, 230, 240, 250, 260, 270, 280, 290, 300, 310, 320, 330, 340, 350, 360, 370, 380, 390, 400, 410, 420, 430, 440, 450, 460, 470, 480, 490, or 500 base pairs.

[0208] In some embodiments, the RD replaces the IND of a target DNA, wherein the IND is an entire target gene or is part of a target gene. In some embodiments, the RD replaces part of an exon or an entire exon, part of an intron or an entire intron, one or more exons and intervening introns, all of the coding regions of a target gene, regulatory sequences of a target gene, or the entire target gene comprising its exons, introns and regulatory sequences, thereby incorporating the one or more intended nucleotide edits compared to the endogenous sequence of the double-stranded target DNA, e.g., the FXN gene. In some embodiments, the RD comprises a region of identity to an endogenous sequence of the double-stranded target DNA. In some embodiments, the RD does not have sequence identity to an endogenous sequence of the double-stranded target DNA. In some embodiments, the RD is exogenous to the double-stranded target DNA, e.g., the target gene. Accordingly, in some embodiments, the intended nucleotide edit(s) comprises replacement of an endogenous sequence of the double-stranded target DNA, e.g., the FXN gene, in its entirety, by the sequence of the RD.

[0209] In some embodiments, the RD has a biological function or encodes a polypeptide having a biological function. In some embodiments, the RD comprises an expression cassette. In some embodiments, the RD comprises a nucleotide sequence that encodes an expression tag, for example, an affinity tag, a His tag, a V5 tag, or a FLAG tag. In some embodiments, the RD comprises a nucleotide sequence that encodes a His tag. In some embodiments, the RD comprises a nucleotide sequence that encodes a FLAG tag. In some embodiments, the RD comprises a nucleotide sequence that encodes an attB or an attP sequence. In some embodiments, the RD comprises a nucleotide sequence that encodes a reporter protein, for example, a green fluorescence protein, a blue fluorescence protein, a cyan fluorescence protein, a yellow fluorescence protein, an auto fluorescent protein, or a luciferase. In some embodiments, the RD comprises a recognition site of an enzyme, for example, a recombinase recognition sequence. In some embodiments, the RD comprises a nucleotide sequence that encodes a selectable marker, for example, an antibiotic resistance marker. In some embodiments, the RD comprises a regulatory sequence, for example, a promoter, an enhancer, or an insulator. In some embodiments, the RD comprises a trackable sequence, for example, a barcode. In some embodiments, replacement of the IND by the RD restores or partially restores the function of the target gene. In some embodiments, the target gene is a disease-associated gene. In some embodiments, the target gene is a monogenic disease-associated gene. In some embodiments, the target gene is a polygenic disease-associated gene. In some embodiments, the target gene is a disease-associated gene containing one or more disease-causing mutations, wherein replacement of the IND by the RD corrects the mutations, thereby restoring or partially restoring the function of the target gene. In some embodiments, the disease-associated gene containing one or more disease-causing mutations is in a human subject in need of treatment. In some embodiments, the target gene is a mutated gene causing a disease or disorder in a human subject, wherein replacement of the IND by the RD corrects the mutated gene, thereby restoring or partially restoring the function of the target gene. In some embodiments, the target gene is a disease-associated gene containing one or more disease-causing mutations, wherein replacement of the IND by the RD modifies the target gene to restore or partially restore the function of the target gene. In some embodiments, the disease-associated gene containing one or more disease-causing mutations is in a human subject in need of treatment. In some embodiments, the target gene is a mutated gene causing a disease or disorder in a human subject, wherein replacement of the IND by the RD modifies the mutated gene to restore or partially restore the function of the target gene.

[0210] The RD and the OD can have varying lengths and GC content. In some embodiments, the first RTT and/or the second RTT is 15 to 83 nucleotides in length. In some embodiments, the first RTT and/or the second RTT is 15 to 38 nucleotides in length. In some embodiments, the first RTT and/or the second RTT is 18 to 38 nucleotides in length. In some embodiments, the first RTT and/or the second RTT is 20 to 38 nucleotides in length. In some embodiments, the first RTT and/or the second RTT is 20, 30, or 38 nucleotides in length. In some embodiments, the first RTT and/or the second RTT is 38 nucleotides in length. In some embodiments, the first RTT and/or the second RTT has a GC content of about 28% to 85%. In some embodiments, the first RTT and/or the second RTT has a GC content of about 40% to 78%. In some embodiments, the first RTT and/or the second RTT has a GC content of at least about 60%. In some embodiments, the first RTT and/or the second RTT has a GC content of at least about 63%.

[0211] In some embodiments, the RD or the OD is 15 to 83 bp in length. In some embodiments, the RD or the OD is 15 to 38 bp in length. In some embodiments, the RD or the OD is 18 to 38 bp in length. In some embodiments, the RD or the OD is 20 to 38 bp in length. In some embodiments, the RD or the OD is 20, 30, or 38 bp in length. In some embodiments, the RD or the OD is 38 bp in length. In some embodiments, the RD or the OD has a GC content of about 28% to 85%. In some embodiments, the RD or the OD has a GC content of about 40% to 78%. In some embodiments, the RD or the OD has a GC content of at least about 60%. In some embodiments, the RD or the OD has a GC content of at least about 63%.

[0212] In some embodiments, the first editing template and the second editing template are partially complementary to each other. As used herein, the first editing template is partially complementary to the second editing template when the first and the second editing templates have complementary or substantially complementary region(s) over part of the length of both editing templates. The partially complementary region(s) in the first editing template and the second editing template can be in any position within the first editing template and the second editing template. Accordingly, in some embodiments, the first newly synthesized single-stranded DNA encoded by the first editing template and the second newly synthesized single-stranded DNA encoded by the second editing template are partially complementary to each other, at any position within the first newly synthesized single-stranded DNA encoded by the first editing template and the second newly synthesized single-stranded DNA encoded by the second editing template. In some embodiments, the first newly synthesized single-stranded DNA comprises a region of complementarity to the second newly synthesized single-stranded DNA, at or near the 3′ end of the first newly synthesized single-stranded DNA. In some embodiments, the first newly synthesized single-stranded DNA comprises a region of complementarity to the second newly synthesized single-stranded DNA, at or near the 5′ end of the first newly synthesized single-stranded DNA. In some embodiments, the first newly synthesized single-stranded DNA comprises a region of complementarity to the second newly synthesized single-stranded DNA, in the middle of the first newly synthesized single-stranded DNA.

[0213] In some embodiments, the second newly synthesized single-stranded DNA comprises a region of complementarity to the first newly synthesized single-stranded DNA, at or near the 3′ end of the second newly synthesized single-stranded DNA. In some embodiments, the second newly synthesized single-stranded DNA comprises a region of complementarity to the first newly synthesized single-stranded DNA, at or near the 5′ end of the second newly synthesized single-stranded DNA. In some embodiments, the second newly synthesized single-stranded DNA comprises a region of complementarity to the first newly synthesized single-stranded DNA, in the middle of the second newly synthesized single-stranded DNA.

[0214] In some embodiments, the first newly synthesized single-stranded DNA and the second newly synthesized single-stranded DNA each comprises a region of complementarity to each other at the 3′ end of each of the first newly synthesized single-stranded DNA and the second newly synthesized single-stranded DNA.

[0215] In some embodiments, the first editing template and the second editing template are of the same length. In some embodiments, the first editing template and the second editing template are of different lengths.

[0216] In some embodiments, the first editing template comprises a region that has complementarity or substantial complementarity to the second editing template (the OD encoding region), and further comprises a region that does not have complementarity to the second editing template. In some embodiments, the first editing template comprises a region that has complementarity or substantial complementarity to the second editing template (the OD encoding region), wherein the region is flanked by one or more regions that do not have complementarity to the second editing template. In some embodiments, the entirety of the first editing template has complementarity or substantial complementarity to a region of the second editing template, wherein the second editing template comprises a region that does not have complementarity to the first editing template.

[0217] In some embodiments, the first editing template comprises a region that does not have complementarity to the second editing template, wherein the region is about 5 to 10, 5 to 15, 5 to 20, 5 to 25, 5 to 30, 5 to 35, 5 to 40, 5 to 45, 5 to 50, 5 to 55, 5 to 60, 5 to 65, 5 to 70, 5 to 75, 5 to 80, 5 to 85, 5 to 90, 5 to 95, 5 to 100, 5 to 110, 5 to 120, 5 to 130, 5 to 140, 5 to 150, 5 to 175, 5 to 200, 5 to 225, 5 to 250, 5 to 275, 5 to 300, 5 to 325, 5 to 350, 5 to 375, 5 to 400, 5 to 425, 5 to 450, 5 to 475, 5 to 500, 10 to 15, 10 to 20, 10 to 25, 10 to 30, 10 to 35, 10 to 40, 10 to 45, 10 to 50, 10 to 55, 10 to 60, 10 to 65, 10 to 70, 10 to 75, 10 to 80, 10 to 85, 10 to 90, 10 to 95, 10 to 100, 10 to 110, 10 to 120, 10 to 130, 10 to 140, 10 to 150, 10 to 175, 10 to 200, 10 to 225, 10 to 250, 10 to 275, 10 to 300, 10 to 325, 10 to 350, 10 to 375, 10 to 400, 10 to 425, 10 to 450, 10 to 475, 10 to 500, 15 to 20, 15 to 25, 15 to 30, 15 to 35, 15 to 40, 15 to 45, 15 to 50, 15 to 55, 15 to 60, 15 to 65, 15 to 70, 15 to 75, 15 to 80, 15 to 85, 15 to 90, 15 to 95, 15 to 100, 15 to 110, 15 to 120, 15 to 130, 15 to 140, 15 to 150, 15 to 175, 15 to 200, 15 to 225, 15 to 250, 15 to 275, 15 to 300, 15 to 325, 15 to 350, 15 to 375, 15 to 400, 15 to 425, 15 to 450, 15 to 475, 15 to 500, 20 to 25, 20 to 30, 20 to 35, 20 to 40, 20 to 45, 20 to 50, 20 to 55, 20 to 60, 20 to 65, 20 to 70, 20 to 75, 20 to 80, 20 to 85, 20 to 90, 20 to 95, 20 to 100, 20 to 110, 20 to 120, 20 to 130, 20 to 140, 20 to 150, 20 to 175, 20 to 200, 20 to 225, 20 to 250, 20 to 275, 20 to 300, 20 to 325, 20 to 350, 20 to 375, 20 to 400, 20 to 425, 20 to 450, 20 to 475, 20 to 500, 30 to 35, 30 to 40, 30 to 45, 30 to 50, 30 to 55, 30 to 60, 30 to 65, 30 to 70, 30 to 75, 30 to 80, 30 to 85, 30 to 90, 30 to 95, 30 to 100, 30 to 110, 30 to 120, 30 to 130, 30 to 140, 30 to 150, 30 to 175, 30 to 200, 30 to 225, 30 to 250, 30 to 275, 30 to 300, 30 to 325, 30 to 350, 30 to 375, 30 to 400, 30 to 425, 30 to 450, 30 to 475, 30 to 500, 40 to 45, 40 to 50, 40 to 55, 40 to 60, 40 to 65, 40 to 70, 40 to 75, 40 to 80, 40 to 85, 40 to 90, 40 to 95, 40 to 100, 40 to 110, 40 to 120, 40 to 130, 40 to 140, 40 to 150, 40 to 175, 40 to 200, 40 to 225, 40 to 250, 40 to 275, 40 to 300, 40 to 325, 40 to 350, 40 to 375, 40 to 400, 40 to 425, 40 to 450, 40 to 475, 40 to 500, 50 to 55, 50 to 60, 50 to 65, 50 to 70, 50 to 75, 50 to 80, 50 to 85, 50 to 90, 50 to 95, 50 to 100, 50 to 110, 50 to 120, 50 to 130, 50 to 140, 50 to 150, 50 to 175, 50 to 200, 50 to 225, 50 to 250, 50 to 275, 50 to 300, 50 to 325, 50 to 350, 50 to 375, 50 to 400, 50 to 425, 50 to 450, 50 to 475, 50 to 500, 75 to 80, 75 to 85, 75 to 90, 75 to 95, 75 to 100, 75 to 110, 75 to 120, 75 to 130, 75 to 140, 75 to 150, 75 to 175, 75 to 200, 75 to 225, 75 to 250, 75 to 275, 75 to 300, 75 to 325, 75 to 350, 75 to 375, 75 to 400, 75 to 425, 75 to 450, 75 to 475, 75 to 500, 100 to 110, 100 to 120, 100 to 130, 100 to 140, 100 to 150, 100 to 175, 100 to 200, 100 to 225, 100 to 250, 100 to 275, 100 to 300, 100 to 325, 100 to 350, 100 to 375, 100 to 400, 100 to 425, 100 to 450, 100 to 475, 100 to 500, 125 to 150, 125 to 175, 125 to 200, 125 to 225, 125 to 250, 125 to 275, 125 to 300, 125 to 325, 125 to 350, 125 to 375, 125 to 400, 125 to 425, 125 to 450, 125 to 475, 125 to 500, 150 to 175, 150 to 200, 150 to 225, 150 to 250, 150 to 275, 150 to 300, 150 to 325, 150 to 350, 150 to 375, 150 to 400, 150 to 425, 150 to 450, 150 to 475, 150 to 500, 175 to 200, 175 to 225, 175 to 250, 175 to 275, 175 to 300, 175 to 325, 175 to 350, 175 to 375, 175 to 400, 175 to 425, 175 to 450, 175 to 475, 175 to 500, 200 to 250, 200 to 275, 200 to 300, 200 to 325, 200 to 350, 200 to 375, 200 to 400, 200 to 425, 200 to 450, 200 to 475, 200 to 500, 225 to 250, 225 to 275, 225 to 300, 225 to 325, 225 to 350, 225 to 375, 225 to 400, 225 to 425, 225 to 450, 225 to 475, 225 to 500, 250 to 275, 250 to 300, 275 to 300, 275 to 325, 275 to 350, 275 to 375, 275 to 400, 275 to 425, 275 to 450, 275 to 475, 275 to 500, 300 to 325, 300 to 350, 300 to 375, 300 to 400, 300 to 425, 300 to 450, 300 to 475, 300 to 500, 325 to 350, 325 to 375, 325 to 400, 325 to 425, 325 to 450, 325 to 475, 325 to 500, 350 to 375, 350 to 400, 350 to 425, 350 to 450, 350 to 475, 350 to 500, 375 to 400, 375 to 425, 375 to 450, 375 to 475, 375 to 500, 400 to 425, 400 to 450, 400 to 475, 400 to 500, 425 to 450, 425 to 475, 425 to 500, 450 to 475, 450 to 500, or 475 to 500 nucleotides in length. In some embodiments, the first editing template comprises a region that does not have complementarity to the second editing template, wherein the region is about 1, 2, 3, 4, 5, 6, 7, 8, 9, 10, 11, 12, 13, 14, 15, 16, 17, 18, 19, 20, 21, 22, 23, 24, 25, 30, 35, 40, 45, 50, 60, 70, 80, 90, 100, 110, 120, 130, 140, 150, 160, 170, 180, 190, 200, 210, 220, 230, 240, 250, 260, 270, 280, 290, 300, 310, 320, 330, 340, 350, 360, 370, 380, 390, 400, 410, 420, 430, 440, 450, 460, 470, 480, 490, or 500 or more nucleotides in length.

[0218] In some embodiments, the second editing template comprises a region that has complementarity or substantial complementarity to the first editing template, and further comprises a region that does not have complementarity to the first editing template. In some embodiments, the second editing template comprises a region that has complementarity or substantial complementarity to the first editing template, and is flanked by one or more regions that do not have complementarity to the first editing template. The region(s) in the first editing template and the second editing template may have same or different lengths. In some embodiments, the entirety of the second editing template has complementarity or substantial complementarity to a region of the first editing template, wherein the first editing template comprises a region that does not have complementarity to the second editing template.

[0219] In some embodiments, the second editing template comprises a region that does not have complementarity to the first editing template, wherein the region is about 5 to 10, 5 to 15, 5 to 20, 5 to 25, 5 to 30, 5 to 35, 5 to 40, 5 to 45, 5 to 50, 5 to 55, 5 to 60, 5 to 65, 5 to 70, 5 to 75, 5 to 80, 5 to 85, 5 to 90, 5 to 95, 5 to 100, 5 to 110, 5 to 120, 5 to 130, 5 to 140, 5 to 150, 5 to 175, 5 to 200, 5 to 225, 5 to 250, 5 to 275, 5 to 300, 5 to 325, 5 to 350, 5 to 375, 5 to 400, 5 to 425, 5 to 450, 5 to 475, 5 to 500, 10 to 15, 10 to 20, 10 to 25, 10 to 30, 10 to 35, 10 to 40, 10 to 45, 10 to 50, 10 to 55, 10 to 60, 10 to 65, 10 to 70, 10 to 75, 10 to 80, 10 to 85, 10 to 90, 10 to 95, 10 to 100, 10 to 110, 10 to 120, 10 to 130, 10 to 140, 10 to 150, 10 to 175, 10 to 200, 10 to 225, 10 to 250, 10 to 275, 10 to 300, 10 to 325, 10 to 350, 10 to 375, 10 to 400, 10 to 425, 10 to 450, 10 to 475, 10 to 500, 15 to 20, 15 to 25, 15 to 30, 15 to 35, 15 to 40, 15 to 45, 15 to 50, 15 to 55, 15 to 60, 15 to 65, 15 to 70, 15 to 75, 15 to 80, 15 to 85, 15 to 90, 15 to 95, 15 to 100, 15 to 110, 15 to 120, 15 to 130, 15 to 140, 15 to 150, 15 to 175, 15 to 200, 15 to 225, 15 to 250, 15 to 275, 15 to 300, 15 to 325, 15 to 350, 15 to 375, 15 to 400, 15 to 425, 15 to 450, 15 to 475, 15 to 500, 20 to 25, 20 to 30, 20 to 35, 20 to 40, 20 to 45, 20 to 50, 20 to 55, 20 to 60, 20 to 65, 20 to 70, 20 to 75, 20 to 80, 20 to 85, 20 to 90, 20 to 95, 20 to 100, 20 to 110, 20 to 120, 20 to 130, 20 to 140, 20 to 150, 20 to 175, 20 to 200, 20 to 225, 20 to 250, 20 to 275, 20 to 300, 20 to 325, 20 to 350, 20 to 375, 20 to 400, 20 to 425, 20 to 450, 20 to 475, 20 to 500, 30 to 35, 30 to 40, 30 to 45, 30 to 50, 30 to 55, 30 to 60, 30 to 65, 30 to 70, 30 to 75, 30 to 80, 30 to 85, 30 to 90, 30 to 95, 30 to 100, 30 to 110, 30 to 120, 30 to 130, 30 to 140, 30 to 150, 30 to 175, 30 to 200, 30 to 225, 30 to 250, 30 to 275, 30 to 300, 30 to 325, 30 to 350, 30 to 375, 30 to 400, 30 to 425, 30 to 450, 30 to 475, 30 to 500, 40 to 45, 40 to 50, 40 to 55, 40 to 60, 40 to 65, 40 to 70, 40 to 75, 40 to 80, 40 to 85, 40 to 90, 40 to 95, 40 to 100, 40 to 110, 40 to 120, 40 to 130, 40 to 140, 40 to 150, 40 to 175, 40 to 200, 40 to 225, 40 to 250, 40 to 275, 40 to 300, 40 to 325, 40 to 350, 40 to 375, 40 to 400, 40 to 425, 40 to 450, 40 to 475, 40 to 500, 50 to 55, 50 to 60, 50 to 65, 50 to 70, 50 to 75, 50 to 80, 50 to 85, 50 to 90, 50 to 95, 50 to 100, 50 to 110, 50 to 120, 50 to 130, 50 to 140, 50 to 150, 50 to 175, 50 to 200, 50 to 225, 50 to 250, 50 to 275, 50 to 300, 50 to 325, 50 to 350, 50 to 375, 50 to 400, 50 to 425, 50 to 450, 50 to 475, 50 to 500, 75 to 80, 75 to 85, 75 to 90, 75 to 95, 75 to 100, 75 to 110, 75 to 120, 75 to 130, 75 to 140, 75 to 150, 75 to 175, 75 to 200, 75 to 225, 75 to 250, 75 to 275, 75 to 300, 75 to 325, 75 to 350, 75 to 375, 75 to 400, 75 to 425, 75 to 450, 75 to 475, 75 to 500, 100 to 110, 100 to 120, 100 to 130, 100 to 140, 100 to 150, 100 to 175, 100 to 200, 100 to 225, 100 to 250, 100 to 275, 100 to 300, 100 to 325, 100 to 350, 100 to 375, 100 to 400, 100 to 425, 100 to 450, 100 to 475, 100 to 500, 125 to 150, 125 to 175, 125 to 200, 125 to 225, 125 to 250, 125 to 275, 125 to 300, 125 to 325, 125 to 350, 125 to 375, 125 to 400, 125 to 425, 125 to 450, 125 to 475, 125 to 500, 150 to 175, 150 to 200, 150 to 225, 150 to 250, 150 to 275, 150 to 300, 150 to 325, 150 to 350, 150 to 375, 150 to 400, 150 to 425, 150 to 450, 150 to 475, 150 to 500, 175 to 200, 175 to 225, 175 to 250, 175 to 275, 175 to 300, 175 to 325, 175 to 350, 175 to 375, 175 to 400, 175 to 425, 175 to 450, 175 to 475, 175 to 500, 200 to 250, 200 to 275, 200 to 300, 200 to 325, 200 to 350, 200 to 375, 200 to 400, 200 to 425, 200 to 450, 200 to 475, 200 to 500, 225 to 250, 225 to 275, 225 to 300, 225 to 325, 225 to 350, 225 to 375, 225 to 400, 225 to 425, 225 to 450, 225 to 475, 225 to 500, 250 to 275, 250 to 300, 275 to 300, 275 to 325, 275 to 350, 275 to 375, 275 to 400, 275 to 425, 275 to 450, 275 to 475, 275 to 500, 300 to 325, 300 to 350, 300 to 375, 300 to 400, 300 to 425, 300 to 450, 300 to 475, 300 to 500, 325 to 350, 325 to 375, 325 to 400, 325 to 425, 325 to 450, 325 to 475, 325 to 500, 350 to 375, 350 to 400, 350 to 425, 350 to 450, 350 to 475, 350 to 500, 375 to 400, 375 to 425, 375 to 450, 375 to 475, 375 to 500, 400 to 425, 400 to 450, 400 to 475, 400 to 500, 425 to 450, 425 to 475, 425 to 500, 450 to 475, 450 to 500, or 475 to 500 nucleotides in length. In some embodiments, the second editing template comprises a region that does not have complementarity to the first editing template, wherein the region is about 1, 2, 3, 4, 5, 6, 7, 8, 9, 10, 11, 12, 13, 14, 15, 16, 17, 18, 19, 20, 21, 22, 23, 24, 25, 30, 35, 40, 45, 50, 60, 70, 80, 90, 100, 110, 120, 130, 140, 150, 160, 170, 180, 190, 200, 210, 220, 230, 240, 250, 260, 270, 280, 290, 300, 310, 320, 330, 340, 350, 360, 370, 380, 390, 400, 410, 420, 430, 440, 450, 460, 470, 480, 490, or 500 or more nucleotides in length.

[0220] In some embodiments, the RD comprises a region (or a subset) of the sequence of the IND. In some embodiments, the RD consists of a region of the sequence of the IND. In some embodiments, the RD comprises one or more intended nucleotide edits compared to the IND. In some embodiments, the RD comprises a region(s) that has substantial sequence identity to the sequence of the IND, wherein the region(s) comprises one or more nucleotide edits compared to the sequence of the IND. For example, the RD may comprise a region that has substantial sequence identity to the sequence of the IND, wherein the region comprises one or more nucleotide substitutions, insertions, or deletions. In some embodiments, the RD comprises a region of the sequence of the IND, and further comprises a region that does not have sequence identity or complementary to the IND. In some embodiments, the RD comprises a region that has substantial identity to the sequence of the IND comprising one or more nucleotide edits, and further comprises a region that does not have sequence identity or complementary to the IND. In some embodiments, the region that does not have sequence identity or complementary to the IND has a biological function or encodes a polypeptide or a portion thereof having a biological function. In some embodiments, the RD comprises one or more intended nucleotide edits compared to the IND and encodes a polypeptide or a portion thereof.

[0221] In some embodiments, the OD comprises a region (or a subset) of the sequence of the IND. In some embodiments, the OD consists of a region of the sequence of the IND. In some embodiments, the OD comprises one or more intended nucleotide edits compared to the IND. In some embodiments, the OD comprises a region(s) that has substantial sequence identity to the sequence of the IND, wherein the region(s) comprise one or more nucleotide edits compared to the sequence of the IND. For example, the OD may comprise a region that has substantial sequence identity to the sequence of the IND, wherein the region comprises one or more nucleotide substitutions, insertions, or deletions. In some embodiments, the OD comprises a region of the sequence of the IND, and further comprises a region that does not have sequence identity or complementary to the IND. In some embodiments, the OD comprises a region that has substantial identity to the sequence of the IND comprising one or more nucleotide edits, and further comprises a region that does not have sequence identity or complementarity to the IND. In some embodiments, the region that does not have sequence identity or complementarity to the IND has a biological function or encodes a polypeptide or a portion thereof having a biological function. In some embodiments, the OD comprises one or more intended nucleotide edits compared to the IND and encodes a polypeptide or a portion thereof.

[0222] In some embodiments, the IND comprises an array of nucleotide motifs. In some embodiments, the IND has an array of three nucleotide repeats (or tri-nucleotide repeats). In some embodiments, the IND has an array of 5-10, 5-15, 5-20, 5-25, 5-30, 5-35, 5-40, 5-50, 5-60, 5-70, 5-80, 5-90, 5-100, 20-30, 20-40, 20-50, 20-60, 20-70, 20-80, 20-90, 20-100, 35-40, 35-50, 35-60, 35-70, 35-80, 35-90, 35-100, 50-70, 50-80, 50-90, 50-100, 50-150, 50-200, 50-250, 50-300, 50-350, 50-400, 50-450, 50-500, 50-550, 50-600, 50-650, 50-700, 50-750, 50-800, 50-850, 50-900, 50-950, 50-1000, 50-1050, 50-1100, 50-1150, 50-1200, 50-1250, 50-1300, 50-1350, 50-1400, 50-1450, 50-1500, 100-150, 100-200, 100-250, 100-300, 100-350, 100-400, 100-450, 100-500, 100-550, 100-600, 100-650, 100-700, 100-750, 100-800, 100-850, 100-900, 100-950, 100-1000, 100-1050, 100-1100, 100-1150, 100-1200, 100-1250, 100-1300, 100-1350, 100-1400, 100-1450, 100-1500, 150-200, 150-250, 150-300, 150-350, 150-400, 150-450, 150-500, 150-550, 150-600, 150-650, 150-700, 150-750, 150-800, 150-850, 150-900, 150-950, 150-1000, 150-1050, 150-1100, 150-1150, 150-1200, 150-1250, 150-1300, 150-1350, 150-1400, 150-1450, 150-1500, 200-250, 200-300, 200-350, 200-400, 200-450, 200-500, 200-550, 200-600, 200-650, 200-700, 200-750, 200-800, 200-850, 200-900, 200-950, 200-1000, 200-1050, 200-1100, 200-1150, 200-1200, 200-1250, 200-1300, 200-1350, 200-1400, 200-1450, 200-1500, 250-300, 250-350, 250-400, 250-450, 250-500, 250-550, 250-600, 250-650, 250-700, 250-750, 250-800, 250-850, 250-900, 250-950, 250-1000, 250-1050, 250-1100, 250-1150, 250-1200, 250-1250, 250-1300, 250-1350, 250-1400, 250-1450, 250-1500, 300-350, 300-400, 300-450, 300-500, 300-550, 300-600, 300-650, 300-700, 300-750, 300-800, 300-850, 300-900, 300-950, 300-1000, 300-1050, 300-1100, 300-1150, 300-1200, 300-1250, 300-1300, 300-1350, 300-1400, 300-1450, 300-1500, 400-450, 400-500, 400-550, 400-600, 400-650, 400-700, 400-750, 400-800, 400-850, 400-900, 400-950, 400-1000, 400-1050, 400-1100, 400-1150, 400-1200, 400-1250, 400-1300, 400-1350, 400-1400, 400-1450, 400-1500, 500-550, 500-600, 500-650, 500-700, 500-750, 500-800, 500-850, 500-900, 500-950, 500-1000, 500-1050, 500-1100, 500-1150, 500-1200, 500-1250, 500-1300, 500-1350, 500-1400, 500-1450, 500-1500, 600-650, 600-700, 600-750, 600-800, 600-850, 600-900, 600-950, 600-1000, 600-1050, 600-1100, 600-1150, 600-1200, 600-1250, 600-1300, 600-1350, 600-1400, 600-1450, 600-1500, 700-750, 700-800, 700-850, 700-900, 700-950, 700-1000, 700-1050, 700-1100, 700-1150, 700-1200, 700-1250, 700-1300, 700-1350, 700-1400, 700-1450, 700-1500, 800-850, 800-900, 800-950, 800-1000, 800-1050, 800-1100, 800-1150, 800-1200, 800-1250, 800-1300, 800-1350, 800-1400, 800-1450, 800-1500, 900-950, 900-1000, 900-1050, 900-1100, 900-1150, 900-1200, 900-1250, 900-1300, 900-1350, 900-1400, 900-1450, 900-1500, 1000-1050, 1000-1100, 1000-1150, 1000-1200, 1000-1250, 1000-1300, 1000-1350, 1000-1400, 1000-1450, 1000-1500, 1100-1200, 1100-1300, 1100-1400, 1100-1500, 1200-1300, 1200-1400, 1200-1500, 1300-1400, 1300-1500, or 1400-1500 tri-nucleotide repeats. In some embodiments, the IND has an array of more than 100, 200, 300, 400, 500, 600, 700, 800, 900, or 1000 repeats. In some embodiments, the IND has an array of more than 1000 repeats. In some embodiments, the IND has an array of more than 1500 repeats. In some embodiments, the IND has an array of 34-65 GAA repeats. In some embodiments, the IND has an array of 44-66 GAA repeats. In some embodiments, the IND has an array of at least 66 GAA repeats. In some embodiments, the IND has an array of 50-1000 GAA repeats. In some embodiments, the IND has an array of 66-1300 GAA repeats. In some embodiments, the IND has an array of 50-150 GAA repeats. In some embodiments, the IND has an array of more than 1000 GAA repeats.

[0223] In some embodiments, the first editing template comprises a region of identity to a sequence adjacent to the second nick site on the second PAM strand of the double-stranded target DNA, wherein the sequence is outside the IND. In some embodiments, the second editing template comprises a region of identity to a sequence adjacent to the first nick site on the first PAM strand of the double-stranded target DNA, wherein the sequence is outside the IND. Accordingly, in some embodiments, the first newly synthesized single-stranded DNA encoded by the first editing template comprises a region of complementarity to a sequence adjacent to the second nick site on the second PAM strand of the double-stranded target DNA, wherein the sequence is outside the IND. In some embodiments, the second newly synthesized single-stranded DNA encoded by the second editing template comprises a region of complementarity to a sequence adjacent to the first nick site on the first PAM strand of the double-stranded target DNA, wherein the sequence is outside the IND.

[0224] In some embodiments, the first newly synthesized single-stranded DNA comprises a region of complementarity to a sequence immediately adjacent to the second nick site on the second PAM strand of the double-stranded target DNA, wherein the sequence is outside the IND. In some embodiments, the second newly synthesized single-stranded DNA encoded by the second editing template comprises a region of complementarity to a sequence immediately adjacent to the first nick site on the first PAM strand of the double-stranded target DNA, wherein the sequence is outside the IND (see, e.g., FIG. 4F).

[0225] In some embodiments, the first newly synthesized single-stranded DNA comprises a region of complementarity to a sequence adjacent to the second nick site on the second PAM strand of the double-stranded target DNA, wherein the sequence is outside the IND, and is 1, 2, 3, 4, 5, 6, 7, 8, 9, or 10 nucleotides apart from the second nick site. In some embodiments, the second newly synthesized single-stranded DNA encoded by the second editing template comprises a region of complementarity to a sequence adjacent to the first nick site on the first PAM strand of the double-stranded target DNA, wherein the sequence is outside the IND, and is 1, 2, 3, 4, 5, 6, 7, 8, 9, or 10 nucleotides apart from the first nick site.

[0226] In some embodiments, the IND consists of all tri-nucleotide repeats of the double-stranded target DNA, e.g. the FXN gene. In some embodiments, through prime editing and DNA repair, the IND is excised, and the tri-nucleotide repeats are deleted from the double-stranded target DNA, e.g., the FXN gene.

[0227] In some embodiments, the IND comprises the tri-nucleotide repeats of the double-stranded target DNA, and further comprises one or more base pairs upstream and/or downstream of the tri-nucleotide repeats of the double-stranded target DNA, e.g., the FXN gene. In some embodiments, through prime editing and DNA repair, the IND is excised, and the array of tri-nucleotide repeats, along with the one or more base pairs upstream and/or downstream of the array of tri-nucleotide repeats are deleted from the double-stranded target DNA, e.g., the FXN gene. Accordingly, in some embodiments, incorporation of the first newly synthesized single-stranded DNA and the second newly synthesized single-stranded DNA results incorporation of one or more intended nucleotide edits, which comprise deletion of the array of the tri-nucleotide repeat sequence. In some embodiments, incorporation of the first newly synthesized single-stranded DNA and the second newly synthesized single-stranded DNA results in incorporation of one or more intended nucleotide edits, which comprise deletion of the array of the tri-nucleotide repeat sequence and deletion of the one or more base pairs upstream and/or downstream of the array of trinucleotide repeat sequence

[0228] In some embodiments, the first editing template and the second editing template each comprises a region of complementarity or substantial complementarity to each other. In some embodiments, the first editing template comprises a sequence that is exogenous to the double-stranded target DNA. In some embodiments, the second editing template comprise a sequence that is exogenous to the double-stranded target DNA. In some embodiments, the sequence in the first editing template that is exogenous to the double-stranded target DNA comprises a region of complementarity or substantial complementarity to the sequence in the second editing template that is exogenous to the double-stranded target DNA. In some embodiments, the sequence in the first editing template that is exogenous to the double-stranded target DNA further comprises a region that is not complementary to the sequence in the second editing template that is exogenous to the double-stranded target DNA. In some embodiments, the sequence in the second editing template that is exogenous to the double-stranded target DNA comprises a region of complementarity or substantial complementarity to the sequence in the first editing template that is exogenous to the double-stranded target DNA. In some embodiments, the sequence in the second editing template that is exogenous to the double-stranded target DNA further comprises a region that is not complementary to the sequence in the first editing template that is exogenous to the double-stranded target DNA. In some embodiments, the first editing template comprises a sequence exogenous to the double-stranded target DNA, wherein the sequence exogenous to the double-stranded target DNA comprises a polynucleotide sequence that encodes an expression tag, for example, an affinity tag, a His tag, a V5 tag, or a FLAG tag. In some embodiments, the first editing template comprises a sequence exogenous to the double-stranded target DNA, wherein the sequence exogenous to the double-stranded target DNA comprises an attB or an attP sequence. In some embodiments, the second editing template comprises a sequence exogenous to the double-stranded target DNA, wherein the sequence exogenous to the double-stranded target DNA comprises a polynucleotide sequence that encodes an expression tag, for example, an affinity tag, a His tag, a V5 tag, or a FLAG tag.

[0229] Accordingly, in some embodiments, the first newly synthesized single-stranded DNA and the second newly synthesized single-stranded DNA each comprises a region of complementarity or substantial complementarity to each other. In some embodiments, the first newly synthesized single-stranded DNA comprise a sequence that is exogenous to the double-stranded target DNA. In some embodiments, the second newly synthesized single-stranded DNA comprise a sequence that is exogenous to the double-stranded target DNA. In some embodiments, the sequence in the first newly synthesized single-stranded DNA that is exogenous to the double-stranded target DNA comprises a region of complementarity or substantial complementarity to the sequence in the second newly synthesized single-stranded DNA that is exogenous to the double-stranded target DNA. In some embodiments, the sequence in the first newly synthesized single-stranded DNA that is exogenous to the double-stranded target DNA further comprises a region that is not complementary to the sequence in the second newly synthesized single-stranded DNA that is exogenous to the double-stranded target DNA. In some embodiments, the sequence in the second newly synthesized single-stranded DNA that is exogenous to the double-stranded target DNA comprises a region of complementarity or substantial complementarity to the sequence in the first newly synthesized single-stranded DNA that is exogenous to the double-stranded target DNA. In some embodiments, the sequence in the second newly synthesized single-stranded DNA that is exogenous to the double-stranded target DNA further comprises a region that is not complementary to the sequence in the first newly synthesized single-stranded DNA that is exogenous to the double-stranded target DNA.

[0230] Accordingly, in some embodiments, the first newly synthesized single-stranded DNA and the second newly synthesized single-stranded DNA form an OD that comprises a sequence that is exogenous to the double-stranded target DNA, e.g. the FXN gene. In some embodiments, the first newly synthesized single-stranded DNA and the second newly synthesized single-stranded DNA form an RD that comprises a sequence that is exogenous to the double-stranded target DNA, e.g. the FXN gene. In some embodiments, the IND comprises substantially all or all tri-nucleotide repeats of the double-stranded target DNA, e.g. the FXN gene. Through prime editing, in some embodiments, the IND is excised and is replaced by the RD. In some embodiments, the IND is excised and is replaced by the RD. Accordingly, in some embodiments, substantially all or all tri-nucleotide repeats of the double-stranded target DNA, e.g., the FXN gene, are deleted and replaced by the sequence exogenous to the double-stranded target DNA, e.g., the FXN gene. In some embodiments, the sequence exogenous to the double-stranded target DNA comprises a polynucleotide sequence that encodes an expression tag, for example, an affinity tag, a His tag, a V5 tag, or a FLAG tag. In some embodiments, the sequence exogenous to the double-stranded target DNA comprises an attB or an attP sequence. Accordingly, in some embodiments, incorporation of the one or more intended nucleotide edits comprises deletion of array of the tri-nucleotide repeat sequence and incorporation of one or more exogenous sequences encoded by the first editing template and/or the second editing template.

[0231] In some embodiments, the first editing template comprises a sequence that has complementarity or substantial complementarity to an endogenous sequence of the double-stranded target DNA, e.g., the FXN gene. In some embodiments, the second editing template comprises a sequence that has complementarity or substantial complementarity to an endogenous sequence of the double-stranded target DNA, e.g., the FXN gene. In some embodiments, the first and/or the second editing template comprises a sequence that has complementarity or substantial complementarity to an endogenous sequence of the double-stranded target gene, e.g., the FXN gene, wherein the endogenous sequence of the double-stranded target DNA, e.g., the FXN gene, does not comprise the array of GAA tri-nucleotide repeat of the double-stranded target DNA, e.g., the FXN gene. In some embodiments, the endogenous sequence of the double-stranded target DNA, e.g., the FXN gene, has complementarity or substantial complementarity to the first and/or the second editing template does not comprise an array of tri-nucleotide repeat or any nucleotide repeat structure. In some embodiments, the first editing template comprises a sequence that has complementarity or substantial complementarity to an endogenous sequence on the second strand of the double-stranded target DNA, e.g., the FXN gene, wherein the endogenous sequence of the double-stranded target DNA, e.g., the FXN gene, is upstream of the array of tri-nucleotide repeats. In some embodiments, the first editing template comprises a sequence that has complementarity or substantial complementarity to an endogenous sequence on the second strand of the double-stranded target DNA, e.g., the FXN gene, wherein the endogenous sequence of the double-stranded target DNA, e.g., the FXN gene, is downstream of the array of tri-nucleotide repeats.

[0232] In some embodiments, the second editing template comprises a sequence that has complementarity or substantial complementarity to an endogenous sequence on the first strand of the double-stranded target DNA, e.g., the FXN gene, wherein the endogenous sequence of the double-stranded target DNA, e.g., the FXN gene, is upstream of the array of tri-nucleotide repeats. In some embodiments, the second editing template comprises a sequence that has complementarity or substantial complementarity to an endogenous sequence on the first strand of the double-stranded target DNA, e.g., the FXN gene, wherein the endogenous sequence of the double-stranded target DNA, e.g., the FXN gene, is downstream of the array of tri-nucleotide repeats.

[0233] In some embodiments, the first editing template comprises a sequence that has complementarity or substantial complementarity to an endogenous sequence on the second strand of the double-stranded target DNA that is upstream of the array of the trinucleotide-repeats, wherein the endogenous sequence is 2, 3, 4, 5, 6, 7, 8, 9, 10, 11, 12, 13, 14, 15, 16, 17, 18, 19, 20, 21, 22, 23, 24, 25, 26, 27, 28, 29, 30, 31, 32, 33, 34, 35, 36, 37, 38, 39, 40, 41, 42, 43, 44, 45, 46, 47, 48, 49, 50, 51, 52, 53, 54, 55, 56, 57, 58, 59, 60, 61, 62, 63, 64, 65, 66, 67, 68, 69, 70, 71, 72, 73, 74, 75, 76, 77, 78, 79, 80, 81, 82, 83, 84, 85, 86, 87, 88, 89, 90, 91, 92, 93, 94, 95, 96, 97, 98, 99, or 100 nucleotides in length.

[0234] In some embodiments, the first editing template comprises a sequence that has complementarity or substantial complementarity to an endogenous sequence on the second strand of the double-stranded target DNA that is downstream of the array of the trinucleotide-repeats, wherein the endogenous sequence is 2, 3, 4, 5, 6, 7, 8, 9, 10, 11, 12, 13, 14, 15, 16, 17, 18, 19, 20, 21, 22, 23, 24, 25, 26, 27, 28, 29, 30, 31, 32, 33, 34, 35, 36, 37, 38, 39, 40, 41, 42, 43, 44, 45, 46, 47, 48, 49, 50, 51, 52, 53, 54, 55, 56, 57, 58, 59, 60, 61, 62, 63, 64, 65, 66, 67, 68, 69, 70, 71, 72, 73, 74, 75, 76, 77, 78, 79, 80, 81, 82, 83, 84, 85, 86, 87, 88, 89, 90, 91, 92, 93, 94, 95, 96, 97, 98, 99, or 100 nucleotides in length.

[0235] In some embodiments, the first editing template comprises a sequence that has complementarity or substantial complementarity to an endogenous sequence on the second strand of the double-stranded target DNA that is upstream of the array of the trinucleotide-repeats, wherein the endogenous sequence is 2, 3, 4, 5, 6, 7, 8, 9, 10, 11, 12, 13, 14, 15, 16, 17, 18, 19, 20, 21, 22, 23, 24, 25, 26, 27, 28, 29, 30, 31, 32, 33, 34, 35, 36, 37, 38, 39, 40, 41, 42, 43, 44, 45, 46, 47, 48, 49, 50, 51, 52, 53, 54, 55, 56, 57, 58, 59, 60, 61, 62, 63, 64, 65, 66, 67, 68, 69, 70, 71, 72, 73, 74, 75, 76, 77, 78, 79, 80, 81, 82, 83, 84, 85, 86, 87, 88, 89, 90, 91, 92, 93, 94, 95, 96, 97, 98, 99, 100, 125, 150, 175, 200, 250, 300, 350, 400, 450, 500 or more nucleotides upstream of the array of the tri-nucleotide repeats as measured at the 5′ ends. In some embodiments, the first editing template comprises a sequence that has complementarity or substantial complementarity to an endogenous sequence on the second strand of the double-stranded target DNA that is downstream of the array of the trinucleotide-repeats, wherein the endogenous sequence is 2,3,4,5, 6, 7, 8, 9, 10, 11, 12, 13, 14, 15, 16, 17, 18, 19, 20, 21, 22, 23, 24, 25, 26, 27, 28, 29, 30, 31, 32, 33, 34, 35, 36, 37, 38, 39, 40, 41, 42, 43, 44, 45, 46, 47, 48, 49, 50, 51, 52, 53, 54, 55, 56, 57, 58, 59, 60, 61, 62, 63, 64, 65, 66, 67, 68, 69, 70, 71, 72, 73, 74, 75, 76, 77, 78, 79, 80, 81, 82, 83, 84, 85, 86, 87, 88, 89, 90, 91, 92, 93, 94, 95, 96, 97, 98, 99, 100, 125, 150, 175, 200, 250, 300, 350, 400, 450, 500 or more nucleotides downstream of the array of the tri-nucleotide repeats as measured at the 5′ ends.

[0236] In some embodiments, the second editing template comprises a sequence that has complementarity or substantial complementarity to an endogenous sequence on the first strand of the double-stranded target DNA that is upstream of the array of the trinucleotide-repeats, wherein the endogenous sequence is 2, 3, 4, 5, 6, 7, 8, 9, 10, 11, 12, 13, 14, 15, 16, 17, 18, 19, 20, 21, 22, 23, 24, 25, 26, 27, 28, 29, 30, 31, 32, 33, 34, 35, 36, 37, 38, 39, 40, 41, 42, 43, 44, 45, 46, 47, 48, 49, 50, 51, 52, 53, 54, 55, 56, 57, 58, 59, 60, 61, 62, 63, 64, 65, 66, 67, 68, 69, 70, 71, 72, 73, 74, 75, 76, 77, 78, 79, 80, 81, 82, 83, 84, 85, 86, 87, 88, 89, 90, 91, 92, 93, 94, 95, 96, 97, 98, 99, or 100 nucleotides in length.

[0237] In some embodiments, the second editing template comprises a sequence that has complementarity or substantial complementarity to an endogenous sequence on the first strand of the double-stranded target DNA that is downstream of the array of the trinucleotide-repeats, wherein the endogenous sequence is 2, 3, 4, 5, 6, 7, 8, 9, 10, 11, 12, 13, 14, 15, 16, 17, 18, 19, 20, 21, 22, 23, 24, 25, 26, 27, 28, 29, 30, 31, 32, 33, 34, 35, 36, 37, 38, 39, 40, 41, 42, 43, 44, 45, 46, 47, 48, 49, 50, 51, 52, 53, 54, 55, 56, 57, 58, 59, 60, 61, 62, 63, 64, 65, 66, 67, 68, 69, 70, 71, 72, 73, 74, 75, 76, 77, 78, 79, 80, 81, 82, 83, 84, 85, 86, 87, 88, 89, 90, 91, 92, 93, 94, 95, 96, 97, 98, 99, or 100 nucleotides in length.

[0238] In some embodiments, the second editing template comprises a sequence that has complementarity or substantial complementarity to an endogenous sequence on the first strand of the double-stranded target DNA that is upstream of the array of the trinucleotide-repeats, wherein the endogenous sequence is 2, 3, 4, 5, 6, 7, 8, 9, 10, 11, 12, 13, 14, 15, 16, 17, 18, 19, 20, 21, 22, 23, 24, 25, 26, 27, 28, 29, 30, 31, 32, 33, 34, 35, 36, 37, 38, 39, 40, 41, 42, 43, 44, 45, 46, 47, 48, 49, 50, 51, 52, 53, 54, 55, 56, 57, 58, 59, 60, 61, 62, 63, 64, 65, 66, 67, 68, 69, 70, 71, 72, 73, 74, 75, 76, 77, 78, 79, 80, 81, 82, 83, 84, 85, 86, 87, 88, 89, 90, 91, 92, 93, 94, 95, 96, 97, 98, 99, 100, 125, 150, 175, 200, 250, 300, 350, 400, 450, 500 or more nucleotides upstream of the array of the tri-nucleotide repeats as measured at the 5′ ends.

[0239] In some embodiments, the second editing template comprises a sequence that has complementarity or substantial complementarity to an endogenous sequence on the first strand of the double-stranded target DNA that is downstream of the array of the trinucleotide-repeats, wherein the endogenous sequence is 2, 3, 4, 5, 6, 7, 8, 9, 10, 11, 12, 13, 14, 15, 16, 17, 18, 19, 20, 21, 22, 23, 24, 25, 26, 27, 28, 29, 30, 31, 32, 33, 34, 35, 36, 37, 38, 39, 40, 41, 42, 43, 44, 45, 46, 47, 48, 49, 50, 51, 52, 53, 54, 55, 56, 57, 58, 59, 60, 61, 62, 63, 64, 65, 66, 67, 68, 69, 70, 71, 72, 73, 74, 75, 76, 77, 78, 79, 80, 81, 82, 83, 84, 85, 86, 87, 88, 89, 90, 91, 92, 93, 94, 95, 96, 97, 98, 99, 100, 125, 150, 175, 200, 250, 300, 350, 400, 450, 500 or more nucleotides downstream of the array of the tri-nucleotide repeats as measured at the 5′ ends.

[0240] In some embodiments, the sequence of the first editing template that has complementarity or substantial complementarity to an endogenous sequence of the double-stranded target DNA comprises a region of complementarity or substantial complementarity to the sequence of the second editing template that has complementarity or substantial complementarity to an endogenous sequence of the double-stranded target DNA. In some embodiments, the sequence of the first editing template that complementarity or substantial complementarity to an endogenous sequence of the double-stranded target DNA further comprises a region that is not complementary to the sequence of the second editing template that has complementarity or substantial complementarity to an endogenous sequence of the double-stranded target DNA. In some embodiments, the sequence of the second editing template that has complementarity or substantial complementarity to an endogenous sequence of the double-stranded target DNA comprises a region of complementarity or substantial complementarity to the sequence of the first editing template that has complementarity or substantial complementarity to an endogenous sequence of the double-stranded target DNA. In some embodiments, the sequence of the second editing template that has complementarity or substantial complementarity to an endogenous sequence of the double-stranded target DNA further comprises a region that is not complementary to the sequence of the first editing template that has identity or substantial identity to an endogenous sequence of the double-stranded target DNA.

[0241] Accordingly, in some embodiments, the first newly synthesized single-stranded DNA comprises a sequence that has identity or substantial identity to an endogenous sequence of the double-stranded target DNA, e.g., the FXN gene. In some embodiments, the second newly synthesized single-stranded DNA comprises a sequence that has identity or substantial identity to an endogenous sequence of the double-stranded target DNA, e.g., the FXN gene. In some embodiments, the first newly synthesized single-stranded DNA and/or the second newly synthesized single-stranded DNA comprises a sequence that has identity or substantial identity to an endogenous sequence of the double-stranded target DNA, e.g., the FXN gene, wherein the endogenous sequence of the double-stranded target DNA, e.g., the FXN gene does not comprise the array of tri-nucleotide repeat of the double-stranded target DNA, e.g., the FXN gene. In some embodiments, the first newly synthesized single-stranded DNA comprises a sequence that has identity or substantial identity to an endogenous sequence on the second strand of the double-stranded target DNA, e.g., the FXN gene, wherein the endogenous sequence of the double-stranded target DNA, e.g., the FXN gene, is upstream of the array of tri-nucleotide repeats. In some embodiments, the first newly synthesized single-stranded DNA comprises a sequence that has identity or substantial identity to an endogenous sequence on the second strand of the double-stranded target DNA, e.g., the FAN gene, wherein the endogenous sequence of the double-stranded target DNA, e.g., the FXN gene, is downstream of the array of tri-nucleotide repeats. In some embodiments, the second newly synthesized single-stranded DNA comprises a sequence that has identity or substantial identity to an endogenous sequence on the first strand of the double-stranded target DNA, e.g., the FXN gene, wherein the endogenous sequence of the double-stranded target DNA, e.g., the FAN gene, is upstream of the array of tri-nucleotide repeats. In some embodiments, the second newly synthesized single-stranded DNA comprises a sequence that has identity or substantial identity to an endogenous sequence on the first strand of the double-stranded target DNA, e.g., the FXN gene, wherein the endogenous sequence of the double-stranded target DNA, e.g., the FAN gene, is downstream of the array of tri-nucleotide repeats.

[0242] In some embodiments, the array of tri-nucleotide repeats of the FXN gene is an array of GAA repeats on the coding strand (the second strand) or the reverse complement TTC repeats on the non-coding strand (the first strand).

[0243] In some embodiments, the sequence of the first newly synthesized single-stranded DNA that has identity or substantial identity to an endogenous sequence of the double-stranded target DNA comprises a region of complementarity or substantial complementarity to the sequence of the second newly synthesized single-stranded DNA that has identity or substantial identity to an endogenous sequence of the double-stranded target DNA. In some embodiments, the sequence of the first newly synthesized single-stranded DNA that has identity or substantial identity to an endogenous sequence of the double-stranded target DNA further comprises a region that is not complementary to the sequence of the second newly synthesized single-stranded DNA that has identity or substantial identity to an endogenous sequence of the double-stranded target DNA. In some embodiments, the sequence of the second newly synthesized single-stranded DNA that has identity or substantial identity to an endogenous sequence of the double-stranded target DNA comprises a region of complementarity or substantial complementarity to the sequence of the first newly synthesized single-stranded DNA that has identity or substantial identity to an endogenous sequence of the double-stranded target DNA. In some embodiments, the sequence of the second newly synthesized single-stranded DNA that has identity or substantial identity to an endogenous sequence of the double-stranded target DNA further comprises a region that is not complementary to the sequence of the first newly synthesized single-stranded DNA that has identity or substantial identity to an endogenous sequence of the double-stranded target DNA.

[0244] Accordingly, in some embodiments, the first newly synthesized single-stranded DNA and the second newly synthesized single-stranded DNA form an OD that comprises an endogenous sequence of the double-stranded target DNA, e.g. the FAN gene. In some embodiments, the first newly synthesized single-stranded DNA and the second newly synthesized single-stranded DNA form an RD that comprises an endogenous sequence of the double-stranded target DNA, e.g. the FXN gene. In some embodiments, the RD or the OD comprises an endogenous sequence of the double-stranded target DNA, e.g., the FXN gene, upstream of the array of tri-nucleotide repeats. In some embodiments, the RD or the OD comprises an endogenous sequence of the double-stranded target DNA, e.g., the FXN gene, downstream of the array of tri-nucleotide repeats. In some embodiments, the RD or the OD comprises a sequence that is endogenous compared to the double-stranded target DNA, e.g., the FXN gene, wherein the sequence comprises two regions: a) a region that is identical or substantially identical to an endogenous sequence upstream of the array of the tri-nucleotide repeats, and b) a region that is identical or substantially identical to an endogenous sequence downstream of the array of the tri-nucleotide repeats. In some embodiments, the region identical or substantially identical to the endogenous sequence upstream of the array of the trinucleotide-repeats is 2, 3, 4, 5, 6, 7, 8, 9, 10, 11, 12, 13, 14, 15, 16, 17, 18, 19, 20, 21, 22, 23, 24, 25, 26, 27, 28, 29, 30, 31, 32, 33, 34, 35, 36, 37, 38, 39, 40, 41, 42, 43, 44, 45, 46, 47, 48, 49, 50, 51, 52, 53, 54, 55, 56, 57, 58, 59, 60, 61, 62, 63, 64, 65, 66, 67, 68, 69, 70, 71, 72, 73, 74, 75, 76, 77, 78, 79, 80, 81, 82, 83, 84, 85, 86, 87, 88, 89, 90, 91, 92, 93, 94, 95, 96, 97, 98, 99, or 100 base pairs in length. In some embodiments, the region identical or substantially identical to the endogenous sequence downstream of the array of the trinucleotide-repeats is 2, 3, 4, 5, 6, 7, 8, 9, 10, 11, 12, 13, 14, 15, 16, 17, 18, 19, 20, 21, 22, 23, 24, 25, 26, 27, 28, 29, 30, 31, 32, 33, 34, 35, 36, 37, 38, 39, 40, 41, 42, 43, 44, 45, 46, 47, 48, 49, 50, 51, 52, 53, 54, 55, 56, 57, 58, 59, 60, 61, 62, 63, 64, 65, 66, 67, 68, 69, 70, 71, 72, 73, 74, 75, 76, 77, 78, 79, 80, 81, 82, 83, 84, 85, 86, 87, 88, 89, 90, 91, 92, 93, 94, 95, 96, 97, 98, 99, or 100 base pairs in length. In some embodiments, the region identical or substantially identical to the endogenous sequence upstream of the array of the trinucleotide-repeats is 2, 3, 4, 5, 6, 7, 8, 9, 10, 11, 12, 13, 14, 15, 16, 17, 18, 19, 20, 21, 22, 23, 24, 25, 26, 27, 28, 29, 30, 31, 32, 33, 34, 35, 36, 37, 38, 39, 40, 41, 42, 43, 44, 45, 46, 47, 48, 49, 50, 51, 52, 53, 54, 55, 56, 57, 58, 59, 60, 61, 62, 63, 64, 65, 66, 67, 68, 69, 70, 71, 72, 73, 74, 75, 76, 77, 78, 79, 80, 81, 82, 83, 84, 85, 86, 87, 88, 89, 90, 91, 92, 93, 94, 95, 96, 97, 98, 99, 100, 125, 150, 175, 200, 250, 300, 350, 400, 450, 500 or more base pairs upstream of the array of the tri-nucleotide repeats as measured at the 5′ ends. In some embodiments, the region identical or substantially identical to the endogenous sequence upstream of the array of the trinucleotide-repeats is 2, 3, 4, 5, 6, 7, 8, 9, 10, 11, 12, 13, 14, 15, 16, 17, 18, 19, 20, 21, 22, 23, 24, 25, 26, 27, 28, 29, 30, 31, 32, 33, 34, 35, 36, 37, 38, 39, 40, 41, 42, 43, 44, 45, 46, 47, 48, 49, 50, 51, 52, 53, 54, 55, 56, 57, 58, 59, 60, 61, 62, 63, 64, 65, 66, 67, 68, 69, 70, 71, 72, 73, 74, 75, 76, 77, 78, 79, 80, 81, 82, 83, 84, 85, 86, 87, 88, 89, 90, 91, 92, 93, 94, 95, 96, 97, 98, 99, 100, 125, 150, 175, 200, 250, 300, 350, 400, 450, 500 or more base pairs downstream of the array of the tri-nucleotide repeats as measured at the 5′ ends. In some embodiments, the array of tri-nucleotide repeats of the FXN gene is an array of GAA (or TTC) repeats.

[0245] In some embodiments, the IND comprises all tri-nucleotide repeats of the double-stranded target DNA, e.g. the entire array of GAA (or the reverse complement TTC) repeats of the FAN gene. In some embodiments, the IND comprises all tri-nucleotide repeats of the double-stranded target DNA, e.g. the entire array of GAA (or TTC) repeats of the FXN gene, and further comprises one or more nucleotides upstream and/or downstream of the array of tri-nucleotide repeats. Through prime editing, the IND is excised and is replaced by the RD or the OD. Accordingly, in some embodiments, all tri-nucleotide repeats of the double-stranded target DNA, e.g., the entire array of GAA (or TTC) repeats of the FXN gene, are deleted, and the endogenous sequence upstream of the array of tri-nucleotide repeats is retained. In some embodiments, all tri-nucleotide repeats of the double-stranded target DNA, e.g. the entire array of GAA (or TTC) repeats of the FXN gene are deleted, and the endogenous sequence downstream of the array of tri-nucleotide repeats is retained. In some embodiments, the IND comprises all tri-nucleotide repeats of the double-stranded target DNA, e.g. the FAN gene. In some embodiments, the first editing template has a different number of tri-nucleotide repeats compared to the number of tri-nucleotide repeats in the IND. In some embodiments, the first editing template has a reduced number of tri-nucleotide repeats compared to the number of tri-nucleotide repeats in the IND. In some embodiments, the second editing template has a different number of tri-nucleotide repeats compared to the number of tri-nucleotide repeats in the IND. In some embodiments, the second editing template has a reduced number of tri-nucleotide repeats compared to the number of tri-nucleotide repeats in the IND.

[0246] Accordingly, in some embodiments, the first newly synthesized single-stranded DNA encoded by the first editing template has a different number of tri-nucleotide repeats compared to the number of tri-nucleotide repeats in the IND. In some embodiments, the first newly synthesized single-stranded DNA encoded by the first editing template has a reduced number of tri-nucleotide repeats compared to the number of tri-nucleotide repeats in the IND. In some embodiments, the second newly synthesized single-stranded DNA encoded by the second editing template has a different number of tri-nucleotide repeats compared to the number of tri-nucleotide repeats in the IND. In some embodiments, the second newly synthesized single-stranded DNA encoded by the second editing template has a reduced number of tri-nucleotide repeats compared to the number of tri-nucleotide repeats in the IND. In some embodiments, the first newly synthesized single-stranded DNA and the second newly synthesized single-stranded DNA can form an OD or a RD that comprises a reduced number of tri-nucleotide repeats compared to the number of tri-nucleotide repeats in the IND.

[0247] In some embodiments, the OD has an array of the same nucleotide repeat motifs, for example, GAA repeats, but of a different number compared to the number of the tri-nucleotide repeats in the IND. In some embodiments, the RD has an array of the same nucleotide repeat motifs, for example, GAA repeats, but of a different number compared to the number of the tri-nucleotide repeats in the IND. In some embodiments, the OD has a reduced number of the tri-nucleotide repeats, e.g., GAA repeats compared to the endogenous number of tri-nucleotide repeats of the double-stranded target DNA, e.g., the FAN gene. In some embodiments, the RD has a reduced number of the tri-nucleotide repeats, e.g., GAA repeats, compared to the endogenous number of tri-nucleotide repeats of the double-stranded target DNA, e.g., the FXN gene. In some embodiments, the RD contains at most 30, 20, 10, or 5 GAA tri-nucleotide repeats. In some embodiments, the RD contains at most 33 GAA tri-nucleotide repeats. In some embodiments, the RD contains at most 12 GAA tri-nucleotide repeats. In some embodiments, the RD contains 5 GAA tri-nucleotide repeats. In some embodiments, the RD contains 30, 20, 10, or 5 GAA tri-nucleotide repeats. In some embodiments, the OD contains at most 30, 20, 10, or 5 GAA tri-nucleotide repeats. In some embodiments, the OD contains 30, 20, 10, or 5 GAA tri-nucleotide repeats. In some embodiments, the OD contains at most 33 GAA tri-nucleotide repeats. In some embodiments, the OD contains at most 12 GAA tri-nucleotide repeats. In some embodiments, the OD contains 5 GAA repeats. In some embodiments, the RD or the OD contains the same number of tri-nucleotide repeats as a reference gene, for example, a wild-type FXN gene.

[0248] Accordingly, in some embodiments, excision of the IND and incorporation of the RD results in deletion of a portion of the nucleotide repeats sequences of the IND from the double-stranded target DNA, e.g., the target gene.

[0249] In some embodiments, excision of the IND and incorporation of the OD results in deletion of a portion of the nucleotide repeats sequences of the IND from the double-stranded target DNA, e.g., the target gene. In some embodiments, the deletion comprises at least 1, 2, 3, 4, 5, 6, 7, 8, 9, 10, 11, 12, 13, 14, 15, 16, 17, 18, 19, 20 or more tri-nucleotide repeats. In some embodiments, the deletion comprises 1-3, 1-5, 1-10, 1-15, 1-20, 1-25, 1-30, 1-35, 1-40, 1-45, 1-50, 1-55, 1-60, 1-75 or more tri-nucleotide repeats. In some embodiments, the deletion comprises at least 1, 2, 3, 4, 5, 6, 7, 8, 9, 10, 11, 12, 13, 14, 15, 16, 17, 18, 19, 20 tri-nucleotide repeats from the double-stranded target DNA, e.g., the target gene. In some embodiments, the deletion comprises 1-3, 1-5, 1-10, 1-15, 1-20, 1-25, 1-30, 1-35, 1-40, 1-45, 1-50, 1-55, 1-60, 1-75 or more tri-nucleotide repeats from the double-stranded target DNA, e.g., the target gene. In some embodiments, the deletion comprises 5-10, 5-15, 5-20, 5-25, 5-30, 5-35, 5-40, 5-50, 5-60, 5-70, 5-80, 5-90, 5-100, 20-30, 20-40, 20-50, 20-60, 20-70, 20-80, 20-90, 20-100, 35-40, 35-50, 35-60, 35-70, 35-80, 35-90, 35-100, 50-70, 50-80, 50-90, 50-100, 50-150, 50-200, 50-250, 50-300, 50-350, 50-400, 50-450, 50-500, 50-550, 50-600, 50-650, 50-700, 50-750, 50-800, 50-850, 50-900, 50-950, 50-1000, 50-1050, 50-1100, 50-1150, 50-1200, 50-1250, 50-1300, 50-1350, 50-1400, 50-1450, 50-1500, 100-150, 100-200, 100-250, 100-300, 100-350, 100-400, 100-450, 100-500, 100-550, 100-600, 100-650, 100-700, 100-750, 100-800, 100-850, 100-900, 100-950, 100-1000, 100-1050, 100-1100, 100-1150, 100-1200, 100-1250, 100-1300, 100-1350, 100-1400, 100-1450, 100-1500, 150-200, 150-250, 150-300, 150-350, 150-400, 150-450, 150-500, 150-550, 150-600, 150-650, 150-700, 150-750, 150-800, 150-850, 150-900, 150-950, 150-1000, 150-1050, 150-1100, 150-1150, 150-1200, 150-1250, 150-1300, 150-1350, 150-1400, 150-1450, 150-1500, 200-250, 200-300, 200-350, 200-400, 200-450, 200-500, 200-550, 200-600, 200-650, 200-700, 200-750, 200-800, 200-850, 200-900, 200-950, 200-1000, 200-1050, 200-1100, 200-1150, 200-1200, 200-1250, 200-1300, 200-1350, 200-1400, 200-1450, 200-1500, 250-300, 250-350, 250-400, 250-450, 250-500, 250-550, 250-600, 250-650, 250-700, 250-750, 250-800, 250-850, 250-900, 250-950, 250-1000, 250-1050, 250-1100, 250-1150, 250-1200, 250-1250, 250-1300, 250-1350, 250-1400, 250-1450, 250-1500, 300-350, 300-400, 300-450, 300-500, 300-550, 300-600, 300-650, 300-700, 300-750, 300-800, 300-850, 300-900, 300-950, 300-1000, 300-1050, 300-1100, 300-1150, 300-1200, 300-1250, 300-1300, 300-1350, 300-1400, 300-1450, 300-1500, 400-450, 400-500, 400-550, 400-600, 400-650, 400-700, 400-750, 400-800, 400-850, 400-900, 400-950, 400-1000, 400-1050, 400-1100, 400-1150, 400-1200, 400-1250, 400-1300, 400-1350, 400-1400, 400-1450, 400-1500, 500-550, 500-600, 500-650, 500-700, 500-750, 500-800, 500-850, 500-900, 500-950, 500-1000, 500-1050, 500-1100, 500-1150, 500-1200, 500-1250, 500-1300, 500-1350, 500-1400, 500-1450, 500-1500, 600-650, 600-700, 600-750, 600-800, 600-850, 600-900, 600-950, 600-1000, 600-1050, 600-1100, 600-1150, 600-1200, 600-1250, 600-1300, 600-1350, 600-1400, 600-1450, 600-1500, 700-750, 700-800, 700-850, 700-900, 700-950, 700-1000, 700-1050, 700-1100, 700-1150, 700-1200, 700-1250, 700-1300, 700-1350, 700-1400, 700-1450, 700-1500, 800-850, 800-900, 800-950, 800-1000, 800-1050, 800-1100, 800-1150, 800-1200, 800-1250, 800-1300, 800-1350, 800-1400, 800-1450, 800-1500, 900-950, 900-1000, 900-1050, 900-1100, 900-1150, 900-1200, 900-1250, 900-1300, 900-1350, 900-1400, 900-1450, 900-1500, 1000-1050, 1000-1100, 1000-1150, 1000-1200, 1000-1250, 1000-1300, 1000-1350, 1000-1400, 1000-1450, 1000-1500, 1100-1200, 1100-1300, 1100-1400, 1100-1500, 1200-1300, 1200-1400, 1200-1500, 1300-1400, 1300-1500, or 1400-1500 tri-nucleotide repeats from the double-stranded target DNA, e.g., the target gene. In some embodiments, the deletion comprises 100, 200, 300, 400, 500, 600, 700, 800, 900, or 1000 trinucleotide repeats from the double-stranded target DNA, e.g., the target gene. In some embodiments, the deletion comprises more than 1000 trinucleotide repeats from the double-stranded target DNA, e.g., the target gene.

[0250] In some embodiments, the first editing template has a reduced number of tri-nucleotide repeats compared to the number of tri-nucleotide repeats in the IND, and further comprises a region that is complementary or substantially complementary to a sequence on the second strand of the double-stranded target DNA that is downstream of the array of tri-nucleotide repeats. In some embodiments, the first editing template has a reduced number of tri-nucleotide repeats compared to the number of tri-nucleotide repeats in the IND, and further comprises a) a region that is complementary or substantially complementary to a sequence on the second strand of the double-stranded target DNA that is downstream of the array of tri-nucleotide repeats, and b) a region that is complementary or substantially complementary to a sequence on the second strand of the double-stranded target DNA that is upstream of the array of tri-nucleotide repeats.

[0251] In some embodiments, the second editing template has a reduced number of tri-nucleotide repeats compared to the number of tri-nucleotide repeats in the IND, and further comprises a region that is complementary or substantially complementary to a sequence on the first strand of the double-stranded target DNA that is upstream of the array of tri-nucleotide repeats. In some embodiments, the second editing template has a reduced number of tri-nucleotide repeats compared to the number of tri-nucleotide repeats in the IND, and further comprises a) a region that is complementary or substantially complementary to a sequence on the first strand of the double-stranded target DNA that is upstream of the array of tri-nucleotide repeats, and b) a region that is complementary or substantially complementary to a sequence on the first strand of the double-stranded target DNA that is downstream of the array of tri-nucleotide repeats.

[0252] Accordingly, in some embodiments, the first newly synthesized single-stranded DNA encoded by the first editing template has a reduced number of tri-nucleotide repeats compared to the number of tri-nucleotide repeats in the IND, and further comprises a region that is identical or substantially identical to a sequence on the second strand of the double-stranded target DNA that is downstream of the array of tri-nucleotide repeats. In some embodiments, the first newly synthesized single-stranded DNA encoded by the first editing template has a reduced number of tri-nucleotide repeats compared to the number of tri-nucleotide repeats in the IND, and further comprises a) a region that is identical or substantially identical to a sequence on the second strand of the double-stranded target DNA that is downstream of the array of tri-nucleotide repeats, and b) a region that is identical or substantially identical to a sequence on the second strand of the double-stranded target DNA that is upstream of the array of tri-nucleotide repeats.

[0253] In some embodiments, the second newly synthesized single-stranded DNA encoded by the second editing template has a reduced number of tri-nucleotide repeats compared to the number of tri-nucleotide repeats in the IND, and further comprises a region that is identical or substantially identical to a sequence on the first strand of the double-stranded target DNA that is upstream of the array of tri-nucleotide repeats. In some embodiments, the second newly synthesized single-stranded DNA encoded by the second editing template has a reduced number of tri-nucleotide repeats compared to the number of tri-nucleotide repeats in the IND, and further comprises a) a region that is identical or substantially identical to a sequence on the first strand of the double-stranded target DNA that is upstream of the array of tri-nucleotide repeats, and b) a region that is identical or substantially identical to a sequence on the first strand of the double-stranded target DNA that is downstream of the array of tri-nucleotide repeats.

[0254] Accordingly, in some embodiments, the RD or the OD has a reduced number of tri-nucleotide repeats compared to the number of tri-nucleotide repeats in the IND, and further comprises a double-stranded sequence of the double-stranded target DNA that is upstream or downstream of the IND. In some embodiments, the RD or the OD has a reduced number of tri-nucleotide repeats compared to the number of tri-nucleotide repeats in the IND, and further comprises a double-stranded sequence of the double-stranded target DNA that is upstream of the IND, and a double-stranded sequence of the double-stranded target DNA that is downstream of the IND.

[0255] In some embodiments, through prime editing, the IND is removed, and the sequence of the RD or the OD is incorporated into the double-stranded target DNA. As a result, a portion of the trinucleotide repeats of the double-stranded target DNA is deleted from the double-stranded target DNA, e.g., the target gene, and the sequences flanking the array of tri-nucleotide repeats are retained.

[0256] In some embodiments, the first editing template and/or the second editing template is partially complementary, substantially complementary, or identical to the sequence of the IND. In some embodiments, for example, the first editing template comprises a region that is complementary or identical to a region of a sequence of the IND. In some embodiments, the first editing template comprises a region of complementarity to the sequence on the first PAM strand of the IND. In some embodiments, the first editing template further comprises a region of complementarity to the second editing template. In some embodiments, the first editing template is partially complementary, substantially complementary or identical to a sequence of the IND, and is also substantially complementary to the second editing template. In some embodiments, the second editing template comprises a region that is complementary or identical to a region of a sequence of the IND. In some embodiments, the second editing template comprises a region of complementarity to the sequence on the second PAM strand of the IND. In some embodiments, the second editing template further comprises a region of complementarity to the first editing template. In some embodiments, the second editing template is partially complementary, substantially complementary or identical to a sequence of the IND, and is also substantially complementary to the first editing template. In some embodiments, the first editing template and the second editing template each comprises a region of complementarity to a sequence of the IND.

[0257] The partially complementary region(s) in the first editing template and the second editing template can be in any position within the first editing template and the second editing template. Accordingly, in some embodiments, the first newly synthesized single-stranded DNA encoded by the first editing template and the second newly synthesized single-stranded DNA encoded by the second editing template are partially complementary to each other, at any position within the first newly synthesized single-stranded DNA encoded by the first editing template and the second newly synthesized single-stranded DNA encoded by the second editing template. In some embodiments, the first newly synthesized single-stranded DNA comprises a region of complementarity to the first strand of the IND, at or near the 3′ end of the first newly synthesized single-stranded DNA. In some embodiments, the first newly synthesized single-stranded DNA comprises a region of complementarity to the first strand of the IND, at or near the 5′ end of the first newly synthesized single-stranded DNA. In some embodiments, the first newly synthesized single-stranded DNA comprises a region of complementarity to the first strand of the IND, in the middle of the first newly synthesized single-stranded DNA. In some embodiments, the second newly synthesized single-stranded DNA comprises a region of complementarity to the second strand of the IND, at or near the 3′ end of the second newly synthesized single-stranded DNA. In some embodiments, the second newly synthesized single-stranded DNA comprises a region of complementarity to the second strand of the IND, at or near the 5′ end of the second newly synthesized single-stranded DNA. In some embodiments, the second newly synthesized single-stranded DNA comprises a region of complementarity to the second strand of the IND, in the middle of the second newly synthesized single-stranded DNA. In some embodiments, the first newly synthesized single-stranded DNA and the second newly synthesized single-stranded DNA each comprises a region of complementarity to each other at the 3′ end.

[0258] Accordingly, as exemplified in FIG. 4C-FIG. 4D, in some embodiments, the first newly synthesized single-stranded DNA encoded by the first editing template comprises a region that is identical to a region of the sequence on the first PAM strand of the IND. In some embodiments, the second newly synthesized single-stranded DNA encoded by the second editing template comprises a region that is identical to a region of the sequence on the second PAM strand of the IND. In some embodiments, the first newly synthesized single-stranded DNA comprises two or more sub regions, each of which is identical to a sub region of the sequence on the first PAM strand of the IND (as exemplified in FIG. 4D). The sub regions on the first newly synthesized single-stranded DNA and/or the first PAM strand of the IND may or may not be consecutive. For example, the first newly synthesized single-stranded DNA may comprise 2 sub regions each identical to a sub region of the sequence on the first PAM strand of the IND, wherein the two sub regions of the sequence on the first PAM strand of the IND are separated by a region that does not have identity or substantial identity to the first newly synthesized single-stranded DNA. In some embodiments, the second newly synthesized single-stranded DNA comprises two or more sub regions, each of which is identical to a sub region of the sequence on the second PAM strand of the IND (as exemplified in FIG. 4D). The sub regions on the second newly synthesized single-stranded DNA and/or the second PAM strand of the IND may or may not be consecutive. For example, the second newly synthesized single-stranded DNA may comprise 2 sub regions each identical to a sub region of the sequence on the second PAM strand of the IND, wherein the two sub regions of the sequence on the second PAM strand of the IND are separated by a region that does not have identity or substantial identity to the second newly synthesized single-stranded DNA.

[0259] In some embodiments, the region of the sequence on the first PAM strand of the IND and the region of the sequence on the second PAM strand of the IND are complementary to each other. In some embodiments, the first newly synthesized single-stranded DNA encoded by the first editing template and the second newly synthesized single-stranded DNA encoded by the second editing template are at least partially complementary to each other and can anneal to each other to form an OD. In some embodiments, the first newly synthesized single-stranded DNA encoded by the first editing template and the second newly synthesized single-stranded DNA encoded by the second editing template are substantially complementary or complementary to each other and can anneal to each other to form an OD. In some embodiments, the IND is excised, and the OD is incorporated in the double-stranded target DNA at the place of the IND excision. As a result, the portion in the IND that is not complementary or identical to the first editing template or the second editing template is deleted from the double-stranded target DNA. In some embodiments, the deletion is at the 3′ end of the IND. In some embodiments, the deletion is at the 5′ end of the IND. In some embodiments, the deletion is in the middle of the IND.

[0260] In some embodiments, the first editing template of the first PEgRNA is at least partially complementary, substantially complementary, at least partially identical, or identical to a sequence of the double-stranded target DNA outside the IND. “Outside the IND” refers to sequences or positions of the double-stranded target DNA that are not in between the two nick sites generated by the first prime editor and the second prime editor. In some embodiments, the first editing template comprises a region of identity to a sequence outside the IND on the second PAM strand (or the first strand) of the double-stranded target DNA. In some embodiments, the first editing template comprises a region of identity to a sequence on the first strand of the double-stranded target DNA adjacent to the second nick site generated by the second prime editor complexed with the second PEgRNA, wherein the sequence is outside the IND. In some embodiments, the first editing template comprises a region of identity to a sequence on the first strand of the double-stranded target DNA immediately adjacent to the second nick site generated by the second prime editor complexed with the second PEgRNA, wherein the sequence is outside the IND.

[0261] Accordingly, as exemplified in FIG. 4E, in some embodiments, the first newly synthesized single-stranded DNA encoded by the first editing template comprises a region of complementarity to a sequence on the first strand of the double-stranded target DNA adjacent or immediately adjacent to the second nick site generated by the second prime editor complexed with the second PEgRNA. In some embodiments, the first newly synthesized single-stranded DNA encoded by the first editing template comprises a region of complementarity to a sequence on the first strand of the double-stranded target DNA immediately adjacent to the second nick site generated by the second prime editor complexed with the second PEgRNA, wherein the sequence is outside the IND. In some embodiments, the first newly synthesized single-stranded DNA anneals with the sequence on the first strand of the double-stranded target DNA adjacent or immediately adjacent to the second nick site generated by the second prime editor. In some embodiments, through DNA repair, the IND is excised and deleted from the double-stranded target DNA, e.g., the target gene.

[0262] In some embodiments, the second editing template of the second PEgRNA is at least partially complementary, substantially complementary, at least partially identical, or identical to a sequence of the double-stranded target DNA outside the IND. In some embodiments, the second editing template of the second PEgRNA comprises a region of identity to a sequence outside the IND on the first PAM strand (or the second strand) of the double-stranded target DNA. In some embodiments, the second editing template of the second PEgRNA comprises a region of identity to a sequence on the second strand of the double-stranded target DNA adjacent to the first nick site generated by the first prime editor complexed with the first PEgRNA, wherein the sequence is outside the IND. In some embodiments, the second editing template of the second PEgRNA comprises a region of identity to a sequence on the second strand of the double-stranded target DNA immediately adjacent to the first nick site generated by the first prime editor complexed with the first PEgRNA, wherein the sequence is outside the IND.

[0263] Accordingly, as exemplified in FIG. 4E, in some embodiments, the second newly synthesized single-stranded DNA encoded by the second editing template comprises a region of complementarity to a sequence on the second strand of the double-stranded target DNA adjacent or immediately adjacent to the first nick site generated by the first prime editor complexed with the first PEgRNA. In some embodiments, the second newly synthesized single-stranded DNA encoded by the second editing template comprises a region of complementarity to a sequence on the second strand of the double-stranded target DNA adjacent or immediately adjacent to the first nick site generated by the first prime editor complexed with the first PEgRNA, wherein the sequence is outside the IND. In some embodiments, the second newly synthesized single-stranded DNA anneals with the sequence on the second strand of the double-stranded target DNA adjacent or immediately adjacent to the first nick site generated by the first prime editor. In some embodiments, through DNA repair, the IND is excised and deleted from the double-stranded target DNA, e.g., the target gene.

[0264] In some embodiments, the first editing template of the first PEgRNA comprises a region at least partially identical to a sequence on the first strand of the double-stranded target DNA immediately adjacent to the second nick site generated by the second prime editor complexed with the second PEgRNA, wherein the sequence is outside the IND. In some embodiments, the second editing template of the second PEgRNA comprises a region at least partially identical to a sequence on the second strand of the double-stranded target DNA immediately adjacent to the first nick site generated by the first prime editor complexed with the first PEgRNA, wherein the sequence is outside the IND. In some embodiments, the first editing template and the second editing template further comprise a region of complementarity or substantial complementarity to each other.

[0265] Accordingly, as exemplified in FIG. 4F, in some embodiments, the first newly synthesized single-stranded DNA encoded by the first editing template comprises a region of complementarity to a sequence on the first strand of the double-stranded target DNA, wherein the sequence is immediately adjacent to the second nick site generated by the second prime editor complexed with the second PEgRNA and is outside the IND. In some embodiments, the second newly synthesized single-stranded DNA encoded by the second editing template comprises a region of complementarity or substantial complementarity to a sequence on the second strand of the double-stranded target DNA, wherein the sequence is immediately adjacent to the first nick site generated by the first prime editor complexed with the first PEgRNA and is outside the IND. In some embodiments, the first newly synthesized single-stranded DNA encoded by the first editing template and the second newly synthesized single-stranded DNA encoded by the second editing template further comprise a region of complementarity or substantial complementarity to each other, and can anneal to each other to form an OD.

[0266] In some embodiments, the first newly synthesized single-stranded DNA encoded by the first editing template further comprises a region that is not complementary to the second newly synthesized single-stranded DNA encoded by the second editing template and does not have complementarity or identity to the double-stranded target DNA. In some embodiments, the second newly synthesized single-stranded DNA encoded by the second editing template further comprises a region that is not complementary to the first newly synthesized single-stranded DNA encoded by the first editing template and does not have complementarity or identity to the double-stranded target DNA, e.g., the target gene.

[0267] Accordingly, in some embodiments, the RD comprises (i) the OD, (ii) the region of the first newly synthesized single-stranded DNA that is not complementary to the second newly synthesized single-stranded DNA and does not have complementarity or identity to the double-stranded target DNA, and a complementary sequence thereof, and (iii) the region of the second newly synthesized single-stranded DNA that is not complementary to the first newly synthesized single-stranded DNA and does not have complementarity or identity to the double-stranded target DNA, and a complementary sequence thereof. In some embodiments, through DNA repair, the IND is excised from the double-stranded target DNA, e.g., the FXN gene, and the RD is incorporated into the double-stranded target DNA.

[0268] In some embodiments, the IND is excised and deleted from the target gene, and the RD is incorporated at the place of excision of the IND. In some embodiments, the IND is excised and deleted from the target gene, and the OD is incorporated at the place of excision of the IND. In some embodiments, the RD comprises a region of identity to an endogenous sequence of the double-stranded target DNA. In some embodiments, the OD comprises a region of identity to an endogenous sequence of the double-stranded target DNA. In some embodiments, the RD does not have sequence identity to an endogenous sequence of the double-stranded target DNA. In some embodiments, the RD is exogenous to the double-stranded target DNA, e.g., the target gene. In some embodiments, the RD has a biological function or encodes a polypeptide having a biological function. In some embodiments, the OD does not have sequence identity to an endogenous sequence of the double-stranded target DNA. In some embodiments, the OD is exogenous to the double-stranded target DNA, e.g., the target gene. In some embodiments, the OD has a biological function or encodes a polypeptide having a biological function.

[0269] In some embodiments, the first editing template of the first PEgRNA comprises a region at least partially identical to a sequence of the double-stranded target DNA that is outside the IND and is not immediately adjacent to (also referred to as “distal to”) the second nick site on the second PAM strand of the double-stranded target DNA. In some embodiments, the first editing template of the first PEgRNA comprises a region of identity to a sequence of double-stranded target DNA on the second PAM strand that is outside the IND and is at least 1, 2, 3, 4, 5, 6, 7, 8, 9, 10, 11, 12, 13, 14, 15, 16, 17, 18, 19, 20 or more nucleotides upstream of the second nick site.

[0270] In some embodiments, the second editing template of the second PEgRNA comprises a region at least partially identical to a sequence of the double-stranded target DNA that is outside the IND and is not immediately adjacent to the first nick site on the first PAM strand of the double-stranded target DNA. In some embodiments, the second editing template of the second PEgRNA comprises a region of identity to a sequence of the double-stranded target DNA on the first PAM strand that is outside the IND and is at least 1, 2, 3, 4, 5, 6, 7, 8, 9, 10, 11, 12, 13, 14, 15, 16, 17, 18, 19, 20 or more nucleotides upstream of the first nick site.

[0271] Accordingly, in some embodiments, the first newly synthesized single-stranded DNA encoded by the first editing template comprises a region of complementarity to a sequence of the double-stranded target DNA that is outside the IND and is not immediately adjacent (i.e., distal) to the second nick site on the second PAM strand. In some embodiments, the first newly synthesized DNA encoded by the first editing template can anneal with the sequence that is outside the IND and is not immediately adjacent to the second nick site on the second PAM strand of the double-stranded target DNA. In some embodiments, the first newly synthesized DNA encoded by the first editing template comprises a region of complementarity to, and can anneal with a sequence of the double-stranded target DNA that is outside the IND and is at least 1, 2, 3, 4, 5, 6, 7, 8, 9, 10, 11, 12, 13, 14, 15, 16, 17, 18, 19, 20 or more nucleotides upstream of the second nick site.

[0272] In some embodiments, the second newly synthesized single-stranded DNA encoded by the second editing template comprises a region of complementarity to a sequence of the first PAM strand of the double-stranded target DNA that is outside the IND and is not immediately adjacent to (also referred to as “distal to”) the first nick site on the first PAM strand. In some embodiments, the second newly synthesized DNA encoded by the second editing template can anneal with the sequence that is outside the IND and is not immediately adjacent to the first nick site on the first PAM strand of the double-stranded target DNA. In some embodiments, the second newly synthesized DNA encoded by the second editing template comprises a region of complementarity to, and can anneal with a sequence of the double-stranded target DNA that is outside the IND and is at least 1, 2, 3, 4, 5, 6, 7, 8, 9, 10, 11, 12, 13, 14, 15, 16, 17, 18, 19, 20 or more nucleotides upstream of the first nick site.

[0273] In some embodiments, through DNA repair, the IND is excised and deleted from the double-stranded target DNA, e.g., the target gene. In some embodiments, the endogenous sequence of the double-stranded target DNA between the 3′ end of the sequence that is outside the IND and is distal to the second nick site on the second PAM strand and the 3′ end of the sequence of the double-stranded target DNA that is outside the IND and is distal to the first nick site on the first PAM strand of the double-stranded target DNA is excised and deleted from the double-stranded target DNA.

[0274] In some embodiments, as exemplified in FIG. 4G, the first protospacer sequence is downstream of the second search target sequence. In some embodiments, the first editing template comprises a region that has complementarity or substantial complementarity to the second editing template, and optionally further comprises a region that does not have a complementarity to the second editing template. In some embodiments, the second editing template comprises a region that has complementarity or substantial complementarity to the first editing template, and optionally further comprises a region that does not have complementarity to the first editing template.

### Prime Editor

[0275] The term “prime editor (PE)” refers to the polypeptide or polypeptide components involved in prime editing. In various embodiments, a prime editor includes a polypeptide domain having DNA binding activity and a polypeptide domain having DNA polymerase activity. In some embodiments, the polypeptide domain having DNA binding activity is a polypeptide domain having programmable DNA binding activity. In some embodiments, the prime editor further comprises a polypeptide domain having nuclease activity. In some embodiments, the polypeptide domain having DNA binding activity comprises a nuclease domain or nuclease activity. In some embodiments, the polypeptide domain having nuclease activity comprises a nickase, or a fully active nuclease. As used herein, the term “nickase” refers to a nuclease capable of cleaving only one strand of a double-stranded DNA target. In some embodiments, the prime editor comprises a polypeptide domain that is an inactive nuclease. In some embodiments, the polypeptide domain having programmable DNA binding activity comprises a nucleic acid guided DNA binding domain, for example, a CRISPR-Cas protein, for example, a Cas9 nickase, a Cpf1 nickase, or another CRISPR-Cas nuclease. In some embodiments, the polypeptide domain having DNA polymerase activity comprises a template-dependent DNA polymerase, for example, a DNA-dependent DNA polymerase or an RNA-dependent DNA polymerase. In some embodiments, the DNA polymerase is a reverse transcriptase. In some embodiments, the prime editor comprises additional polypeptides or polypeptide domains involved in prime editing, for example, a polypeptide domain having 5′ endonuclease activity, e.g., a 5′ endogenous DNA flap endonucleases (e.g., FEN1), for helping to drive the prime editing process towards the edited product formation. In some embodiments, the prime editor further comprises an RNA-protein recruitment polypeptide, for example, a MS2 coat protein.

[0276] A prime editor may be engineered. In some embodiments, the polypeptide components of a prime editor do not naturally occur in the same organism or cellular environment. In some embodiments, the polypeptide components of a prime editor may be of different origins or from different organisms. In some embodiments, a prime editor comprises a DNA binding domain and a DNA polymerase domain that are derived from different species. In some embodiments, a prime editor comprises a Cas polypeptide and a reverse transcriptase polypeptide that are derived from different species. For example, a prime editor may comprise a S. pyogenes Cas9 polypeptide and a Moloney murine leukemia virus (M-MLV) reverse transcriptase polypeptide.

[0277] In some embodiments, polypeptide domains of a prime editor may be fused or linked by a peptide linker to form a fusion protein. In other embodiments, a prime editor comprises one or more polypeptide domains provided in trans as separate proteins, which are capable of being associated to each other through non-peptide linkages or through aptamers or recruitment sequences. For example, a prime editor may comprise a DNA binding domain and a reverse transcriptase domain associated with each other by an RNA-protein recruitment aptamer, e.g., an MS2 aptamer, which may be linked to a PEgRNA. Prime editor polypeptide components may be encoded by one or more polynucleotides in whole or in part. In some embodiments, a single polynucleotide, construct, or vector encodes the prime editor fusion protein. In some embodiments, multiple polynucleotides, constructs, or vectors each encode a polypeptide domain or portion of a domain of a prime editor, or a portion of a prime editor fusion protein. For example, a prime editor fusion protein may comprise an N-terminal portion fused to an intein-N and a C-terminal portion fused to an intein-C, each of which is individually encoded by an AAV vector.

[0278] The term “prime editor complex” is used interchangeably with the term “prime editing complex” and refers to a complex comprising one or more prime editor components (e.g., a polypeptide domain having DNA binding activity and a polypeptide domain having DNA polymerase activity) complexed with a PEgRNA.

### Prime Editor Nucleotide Polymerase Domain

[0279] In some embodiments, a prime editor comprises a nucleotide polymerase domain, e.g., a DNA polymerase domain. The DNA polymerase domain may be a wild-type DNA polymerase domain, a full-length DNA polymerase protein domain, or may be a functional mutant, a functional variant, or a functional fragment thereof. In some embodiments, the polymerase domain is a template dependent polymerase domain. For example, the DNA polymerase may rely on a template polynucleotide strand, e.g., the editing template sequence, for new strand DNA synthesis. In some embodiments, the prime editor comprises a DNA-dependent DNA polymerase. For example, a prime editor having a DNA-dependent DNA polymerase can synthesize a new single-stranded DNA using a PEgRNA editing template that comprises a DNA sequence as a template. In such cases, the PEgRNA is a chimeric or hybrid PEgRNA, and comprises an extension arm comprising a DNA strand. As used herein, an “extension arm” is a polynucleotide portion of a PEgRNA that comprises an editing template and a primer binding site sequence (PBS). In some embodiments, an extension arm further comprises additional components, for example, a 3′ modifier. The chimeric or hybrid PEgRNA may comprise an RNA portion (including the spacer and the gRNA core) and a DNA portion (the extension arm comprising the editing template that includes a strand of DNA).

[0280] The DNA polymerases can be wild-type polymerases from eukaryotic, prokaryotic, archael, or viral organisms, and/or the polymerases may be modified by genetic engineering, mutagenesis, or directed evolution-based processes. The polymerases can be a T7 DNA polymerase, T5 DNA polymerase, T4 DNA polymerase, Klenow fragment DNA polymerase, DNA polymerase III, and the like. The polymerases can be thermostable, and can include Taq, Tne, Tma, Pfu, Tfl, Tth, Stoffel fragment, VENT® and DEEPVENT® DNA polymerases, KOD, Tgo, JDF3, and variants and derivatives thereof.

[0281] In some embodiments, the DNA polymerase is a bacteriophage polymerase, for example, a T4, T7, or phi29 DNA polymerase. In some embodiments, the DNA polymerase is an archaeal polymerase, for example, pol I type archaeal polymerase or a pol II type archaeal polymerase. In some embodiments, the DNA polymerase comprises a thermostable archaeal DNA polymerase. In some embodiments, the DNA polymerase comprises a eubacterial DNA polymerase, for example, Pol I, Pol II, or Pol III polymerase. In some embodiments, the DNA polymerase is a Pol I family DNA polymerase. In some embodiments, the DNA polymerase is an E. coli Pol I DNA polymerase. In some embodiments, the DNA polymerase is a Pol II family DNA polymerase. In some embodiments, the DNA polymerase is a Pyrococcus furiosus (Pfu) Pol II DNA polymerase. In some embodiments, the DNA polymerase is a Pol IV family DNA polymerase. In some embodiments, the DNA polymerase is an E. coli Pol IV DNA polymerase.

[0282] In some embodiments, the DNA polymerase comprises a eukaryotic DNA polymerase. In some embodiments, the DNA polymerase is a Pol-beta DNA polymerase, a Pol-lambda DNA polymerase, a Pol-sigma DNA polymerase, or a Pol-mu DNA polymerase. In some embodiments, the DNA polymerase is a Pol-alpha DNA polymerase. In some embodiments, the DNA polymerase is a POLA1 DNA polymerase. In some embodiments, the DNA polymerase is a POLA2 DNA polymerase. In some embodiments, the DNA polymerase is a Pol-delta DNA polymerase. In some embodiments, the DNA polymerase is a POLD1 DNA polymerase. In some embodiments, the DNA polymerase is a POLD2 DNA polymerase. In some embodiments, the DNA polymerase is a human POLD1 DNA polymerase. In some embodiments, the DNA polymerase is a human POLD2 DNA polymerase. In some embodiments, the DNA polymerase is a POLD3 DNA polymerase. In some embodiments, the DNA polymerase is a POLD4 DNA polymerase. In some embodiments, the DNA polymerase is a Pol-epsilon DNA polymerase. In some embodiments, the DNA polymerase is a POLE1 DNA polymerase. In some embodiments, the DNA polymerase is a POLE2 DNA polymerase. In some embodiments, the DNA polymerase is a POLE3 DNA polymerase. In some embodiments, the DNA polymerase is a Pol-eta (POLH) DNA polymerase. In some embodiments, the DNA polymerase is a Pol-iota (POLI) DNA polymerase. In some embodiments, the DNA polymerase is a Pol-kappa (POLK) DNA polymerase. In some embodiments, the DNA polymerase is a Rev1 DNA polymerase. In some embodiments, the DNA polymerase is a human Rev1 DNA polymerase. In some embodiments, the DNA polymerase is a viral DNA-dependent DNA polymerase. In some embodiments, the DNA polymerase is a B family DNA polymerases. In some embodiments, the DNA polymerase is a herpes simplex virus (HSV) UL30 DNA polymerase. In some embodiments, the DNA polymerase is a cytomegalovirus (CMV) UL54 DNA polymerase.

[0283] In some embodiments, the DNA polymerase is an archaeal polymerase. In some embodiments, the DNA polymerase is a Family B/pol I type DNA polymerase. For example, in some embodiments, the DNA polymerase is a homolog of Pfu from Pyrococcus furiosus. In some embodiments, the DNA polymerase is a pol II type DNA polymerase. For example, in some embodiments, the DNA polymerase is a homolog of P. furiosus DP1/DP2 2-subunit polymerase. In some embodiments, the DNA polymerase lacks 5′ to 3′ nuclease activity. Suitable DNA polymerases (pol I or pol II) can be derived from archaea with optimal growth temperatures that are similar to the desired assay temperatures.

[0284] In some embodiments, the DNA polymerase comprises a thermostable archaeal DNA polymerase. In some embodiments, the thermostable DNA polymerase is isolated or derived from Pyrococcus spp. (furiosus, GB-D, woesii, abysii, horikoshii), Thermococcus spp. (kodakaraensis KODI, litoralis, 9 degrees North-7, JDF-3, gorgonarius), Pyrodictium occultum, and Archaeoglobus fulgidus.

[0285] Polymerases may also be from eubacterial species. In some embodiments, the DNA polymerase is a Pol I family DNA polymerase. In some embodiments, the DNA polymerase is an E. coli Pol I DNA polymerase. In some embodiments, the DNA polymerase is a Pol II family DNA polymerase. In some embodiments, the DNA polymerase is a Pyrococcus furiosus (Pfu) Pol II DNA polymerase. In some embodiments, the DNA polymerase is a Pol III family DNA polymerase. In some embodiments, the DNA polymerase is a Pol IV family DNA polymerase. In some embodiments, the DNA polymerase is an E. coli Pol IV DNA polymerase. In some embodiments, the Pol I DNA polymerase is a DNA polymerase functional variant that lacks or has reduced 5′ to 3′ exonuclease activity.

[0286] Suitable thermostable pol I DNA polymerases can be isolated from a variety of thermophilic eubacteria, including Thermus species and Thermotoga maritima, such as Thermus aquaticus (Taq), Thermus thermophilus (Tth) and Thermotoga maritima (Tma UlTma).

[0287] In some embodiments, a prime editor comprises an RNA-dependent DNA polymerase domain, for example, a reverse transcriptase (RT). A RT or an RT domain may be a wild-type RT domain, a full-length RT domain, or may be a functional mutant, a functional variant, or a functional fragment thereof. An RT or an RT domain of a prime editor may comprise a wild-type RT, or may be engineered or evolved to contain specific amino acid substitutions, truncations, or variants. An engineered RT may comprise sequences or amino acid changes different from a naturally occurring RT. In some embodiments, the engineered RT may have improved reverse transcription activity over a naturally occurring RT or RT domain. In some embodiments, the engineered RT may have improved features over a naturally occurring RT, for example, improved thermostability, reverse transcription efficiency, or target fidelity. In some embodiments, a prime editor comprising the engineered RT has improved prime editing efficiency over a prime editor having a reference naturally occurring RT.

[0288] In some embodiments, a prime editor comprises a virus RT, for example, a retrovirus RT. Non-limiting examples of virus RT include reference Moloney murine leukemia virus (M-MLV or MLVRT); human T-cell leukemia virus type 1 (HTLV-1) RT; bovine leukemia virus (BLV) RT; Rous Sarcoma Virus (RSV) RT; human immunodeficiency virus (HIV) RT, M-MFV RT, Avian Sarcoma-Leukosis Virus (ASLV) RT, Rous Sarcoma Virus (RSV) RT, Avian Myeloblastosis Virus (AMV) RT, Avian Erythroblastosis Virus (AEV) Helper Virus RT, Avian Myelocytomatosis Virus MC29 Helper Virus (MCAV) RT, Avian Reticuloendotheliosis Virus Helper Virus (REV-T/A) RT, Avian Sarcoma Virus UR2 Helper Virus (UR2AV) RT, Avian Sarcoma Virus Y73 Helper Virus (YAV) RT, Rous Associated Virus (RAV) RT, and Myeloblastosis Associated Virus (MAV) RT, all of which may be suitably used in the methods and compositions described herein.

[0289] In some embodiments, the prime editor comprises a reference M-MLV RT. In some embodiments, the prime editor comprises a reference MMLV RT having the sequence as set forth in SEQ ID NO: 2284.

[0290] In some embodiments, the prime editor comprises a M-MLV RT comprising one or more of amino acid substitutions P51X, S67X, E69X, L139X, T197X, D200X, H204X, F209X, E302X, T306X, F309X, W313X, T330X, L345X, L435X, N454X, D524X, E562X, D583X, H594X, L603X, E607X, or D653X as compared to the reference M-MLV RT as set forth in SEQ ID NO: 2284, where X is any amino acid other than the wild-type amino acid. In some embodiments, the prime editor comprises a M-MLV RT comprising one or more of amino acid substitutions P51L, S67K, E69K, L139P, T197A, D200N, H204R, F209N, E302K, E302R, T306K, F309N, W313F, T330P, L345G, L435G, N454K, D524G, E562Q, D583N, H594Q, L603W, E607K, and D653N as compared to the reference M-MLV RT as set forth in SEQ ID NO: 2284. In some embodiments, the prime editor comprises a reference M-MLV RT comprising one or more amino acid substitutions D200N, T330P, L603W, T306K, and W313F as compared to the reference M-MLV RT as set forth in SEQ ID NO: 2284. In some embodiments, the prime editor comprises a reference M-MLV RT comprising amino acid substitutions D200N, T330P, L603W, T306K, and W313F as compared to the reference M-MLV RT as set forth in SEQ ID NO: 2284. In some embodiments, a prime editor comprises a M-MLV RT variant having the sequence as set forth in SEQ ID NO: 2283. The M-MLV RT reference and variant sequences are shown below in Tables 63 and 81.

[0291] In some embodiments, a RT variant may be a functional fragment of a reference RT that has 1, 2, 3, 4, 5, 6, 7, 8, 9, 10, 11, 12, 13, 14, 15, 16, 17, 18, 19, 20, 21, 22, 21, 24, 25, 26, 27, 28, 29, 30, 31, 32, 33, 34, 35, 36, 37, 38, 39, 40, 41, 42, 43, 44, 45, 46, 47, 48, 49, 50, or up to 100, or up to 200, or up to 300, or up to 400, or up to 500 or more amino acid changes compared to a reference RT, e.g., a wild-type RT. In some embodiments, the RT variant comprises a fragment of a reference RT, e.g., a wild-type RT, such that the fragment is about 70% identical, about 80% identical, about 90% identical, about 95% identical, about 96% identical, about 97% identical, about 98% identical, about 99% identical, about 99.5% identical, or about 99.9% identical to the corresponding fragment of the reference RT. In some embodiments, the fragment is 30%, 35%, 40%, 45%, 50%, 55%, 60%, 65%, 70%, 75%, 80%, 85%, 90%, 95%, 96%, 97%, 98%, 99%, or 99.5% of the amino acid length of a corresponding reference RT (M-MLV reverse transcriptase), e.g., SEQ ID NO: 2284.

[0292] In some embodiments, the RT functional fragment is at least 100 amino acids in length. In some embodiments, the fragment is at least 100, 150, 200, 250, 300, 350, 400, 450, 500, 550, or up to 600 or more amino acids in length.

[0293] In still other embodiments, the functional RT variant is truncated at the N-terminus or the C-terminus, or both, by a certain number of amino acids which results in a truncated variant which still retains sufficient DNA polymerase function. In some embodiments, the RT truncated variant has a truncation of at least 1, at least 2, at least 3, at least 4, at least 5, at least 6, at least 7, at least 8, at least 9, at least 10, at least 11, at least 12, at least 13, at least 14, at least 15, at least 16, at least 17, at least 18, at least 19, at least 20, at least 21, at least 22, at least 23, at least 24, at least 25, at least 30, 40, 50, 60, 70, 80, 90, 100, 110, 120, 130, 140, 150, 160, 170, 180, 190, 200, 210, 220, 230, 240, or 250 amino acids at the N-terminal end compared to a reference RT. In some embodiments, the reference RT has the sequence as set forth in SEQ ID NO: 2284. In other embodiments, the RT truncated variant has a truncation of at least 1, at least 2, at least 3, at least 4, at least 5, at least 6, at least 7, at least 8, at least 9, at least 10, at least 11, at least 12, at least 13, at least 14, at least 15, at least 16, at least 17, at least 18, at least 19, at least 20, at least 21, at least 22, at least 23, at least 24, at least 25, at least 30, 40, 50, 60, 70, 80, 90, 100, 110, 120, 130, 140, 150, 160, 170, 180, 190, 200, 210, 220, 230, 240, or 250 amino acids at the C-terminal end compared to a reference RT. In some embodiments, the reference RT has the sequence as set forth in SEQ ID NO: 2284. In still other embodiments, the RT truncated variant has a truncation at the N-terminal and the C-terminal end compared to a reference RTIn some embodiments, the N-terminal truncation and the C-terminal truncation are of the same length. In some embodiments, the N-terminal truncation and the C-terminal truncation are of different lengths.

[0294] For example, the prime editors disclosed herein may include a functional variant of a reference M-MLV reverse transcriptase. In some embodiments, the prime editor comprises a functional variant of a reference M-MLV RT, wherein the functional variant of reference M-MLV RT is truncated after amino acid position 502 compared to a reference M-MLV RT as set forth in SEQ ID NO: 2284. In some embodiments, the functional variant of reference M-MLV RT further comprises a D200X, T306X, W313X, and/or T330X amino acid substitution compared to a reference M-MLV RT as set forth in SEQ ID NO: 2284, wherein X is any amino acid other than the original amino acid. In some embodiments, the functional variant of M-MLV RT further comprises a D200N, T306K, W313F, and/or T330P amino acid substitution compared to a reference M-MLV RT as set forth in SEQ ID NO: 2284, wherein X is any amino acid other than the original amino acid. A DNA sequence encoding a prime editor comprising this truncated RT is 522 bp smaller than the DNA encoding the reference M-MLV RT as set forth in SEQ ID NO: 2284, and therefore makes it potentially useful for applications where delivery of the DNA sequence is challenging due to its size (i.e., adeno-associated virus and lentivirus delivery). In some embodiments, a prime editor comprises a M-MLV RT variant, wherein the M-MLV RT variant comprises a sequence having at least 80%, 85%, 90%, 91%, 92%, 93%, 94%, 95%, 96%, 97%, 98%, 99%, 99.9%, or 100% identity to SEQ ID NO: 2283. In some embodiments, a prime editor comprises a M-MLV RT variant, wherein the M-MLV RT variant consists of the amino acid sequence set forth in SEQ ID NO: 2283.

[0295] In some embodiments, a prime editor comprises a eukaryotic RT, for example, a yeast, drosophila, rodent, or primate RT. In some embodiments, the prime editor comprises a Group II intron RT, for example, a Geobacillus stearothermophilus Group II Intron (GsI-IIC) RT or a Eubacterium rectale group II intron (Eu.re.I2) RT. In some embodiments, the prime editor comprises a retron RT.

### Programmable DNA Binding Domain

[0296] In some embodiments, the DNA-binding domain of a prime editor is a programmable DNA binding domain. A programmable DNA binding domain refers to a protein domain that is designed to bind a specific nucleic acid sequence, e.g., a target DNA or a target RNA. In some embodiments, the DNA-binding domain is a polynucleotide programmable DNA-binding domain that can associate with a guide polynucleotide (e.g., a PEgRNA) that guides the DNA-binding domain to a specific DNA sequence, e.g., a search target sequence in a target gene. In some embodiments, the DNA-binding domain comprises a Clustered Regularly Interspaced Short Palindromic Repeats (CRISPR) Associated (Cas) protein. A Cas protein may comprise any Cas protein described herein or a functional fragment or functional variant thereof. In some embodiments, a DNA-binding domain may also comprise a zinc-finger protein domain. In other cases, a DNA-binding domain comprises a transcription activator-like effector domain (TALE). In some embodiments, the DNA-binding domain comprises a DNA nuclease. For example, the DNA-binding domain of a prime editor may comprise an RNA-guided DNA endonuclease, e.g., a Cas protein. In some embodiments, the DNA-binding domain comprises a zinc finger nuclease (ZFN) or a transcription activator like effector domain nuclease (TALEN), where one or more zinc finger motifs or TALE motifs are associated with one or more nucleases, e.g., a Fok I nuclease domain.

[0297] In some embodiments, the DNA-binding domain comprise a nuclease activity. In some embodiments, the DNA-binding domain of a prime editor comprises an endonuclease domain having single strand DNA cleavage activity. For example, the endonuclease domain may comprise a FokI nuclease domain. In some embodiments, the DNA-binding domain of a prime editor comprises a nuclease having full nuclease activity. In some embodiments, the DNA-binding domain of a prime editor comprises a nuclease having modified or reduced nuclease activity as compared to a wild-type endonuclease domain. For example, the endonuclease domain may comprise one or more amino acid substitutions as compared to a wild-type endonuclease domain. In some embodiments, the DNA-binding domain of a prime editor has nickase activity. In some embodiments, the DNA-binding domain of a prime editor comprises a Cas protein domain that is a nickase. In some embodiments, compared to a wild-type Cas protein, the Cas nickase comprises one or more amino acid substitutions in a nuclease domain that reduces or abolishes its double strand nuclease activity but retains DNA binding activity. In some embodiments, the Cas nickase comprises an amino acid substitution in a HNH domain. In some embodiments, the Cas nickase comprises an amino acid substitution in a RuvC domain.

[0298] In some embodiments, the DNA-binding domain comprises a CRISPR associated protein (Cas protein) domain. A Cas protein may be a Class 1 or a Class 2 Cas protein. A Cas protein can be a type I, type II, type III, type IV, type V Cas protein, or a type VI Cas protein. Non-limiting examples of Cas proteins include Cas9, Cas12a (Cpf1), Cas12e (CasX), Cas12d (CasY), Cas12b1 (C2c1), Cas12b2, Cas12c (C2c3), C2c4, C2c8, C2c5, C2c10, C2c9, Cas14a, Cas14b, Cas14c, Cas14d, Cas14e, Cas14f, Cas14g, Cas14h, Cas14u, Cns2, Cas Φ, and homologs, functional fragments, or modified versions thereof. A Cas protein can be a chimeric Cas protein that is fused to other proteins or polypeptides. A Cas protein can be a chimera of various Cas proteins, for example, comprising domains of Cas proteins from different organisms.

[0299] A Cas protein, e.g., Cas9, can be from any suitable organism. In some aspects, the organism is Streptococcus pyogenes (S. pyogenes). In some aspects, the organism is Staphylococcus aureus (S. aureus). In some aspects, the organism is Streptococcus thermophilus (S. thermophilus). In some embodiments, the organism is Staphylococcus lugdunensis.

[0300] A Cas protein, e.g., Cas9, can be a wild-type or a modified form of a Cas protein. A Cas protein, e.g., Cas9, can be a nuclease active variant, nuclease inactive variant, a nickase, or a functional variant or functional fragment of a wild-type Cas protein. A Cas protein, e.g., Cas9, can comprise an amino acid change such as a deletion, insertion, substitution, fusion, chimera, or any combination thereof relative to a wild-type version of the Cas protein. A Cas protein can be a polypeptide with at least about 50%, 60%, 70%, 80%, 90%, 91%, 92%, 93%, 94%, 95%, 96%, 97%, 98%, 99%, or 100% sequence identity or sequence similarity to a wild-type exemplary Cas protein.

[0301] A Cas protein, e.g., Cas9, may comprise one or more domains. Non-limiting examples of Cas domains include, guide nucleic acid recognition and/or binding domain, nuclease domains (e.g., DNase or RNase domains, RuvC, HNH), DNA binding domain, RNA binding domain, helicase domains, protein-protein interaction domains, and dimerization domains. In various embodiments, a Cas protein comprises a guide nucleic acid recognition and/or binding domain that can interact with a guide nucleic acid, and one or more nuclease domains that comprise catalytic activity for nucleic acid cleavage.

[0302] In some embodiments, a Cas protein, e.g., Cas9, comprises one or more nuclease domains. A Cas protein can comprise an amino acid sequence having at least about 50%, 60%, 70%, 80%, 90%, 91%, 92%, 93%, 94%, 95%, 96%, 97%, 98%, 99%, or 100% sequence identity to a nuclease domain (e.g., RuvC domain, HNH domain) of a wild-type Cas protein. In some embodiments, a Cas protein comprises a single nuclease domain. For example, a Cpf1 may comprise a RuvC domain but lacks HNH domain. In some embodiments, a Cas protein comprises two nuclease domains, e.g., a Cas9 protein can comprise an HNH nuclease domain and a RuvC nuclease domain.

[0303] In some embodiments, a prime editor comprises a Cas protein, e.g., Cas9, wherein all nuclease domains of the Cas protein are active. In some embodiments, a prime editor comprises a Cas protein having one or more inactive nuclease domains. One or a plurality of the nuclease domains (e.g., RuvC, HNH) of a Cas protein can be deleted or mutated so that they are no longer functional or comprise reduced nuclease activity. In some embodiments, a Cas protein, e.g., Cas9, comprising mutations in a nuclease domain has reduced (e.g., nickase) or abolished nuclease activity while maintaining its ability to target a nucleic acid locus at a search target sequence when complexed with a guide nucleic acid, e.g., a PEgRNA.

[0304] In some embodiments, a prime editor comprises a Cas nickase that can bind to the target gene in a sequence-specific manner and generate a single-strand break at a protospacer within double-stranded DNA in the target gene, but not a double-strand break. For example, the Cas nickase can cleave the edit strand (i.e., the PAM strand) or the non-edit strand of the target gene, but may not cleave both. In some embodiments, a prime editor comprises a Cas nickase comprising two nuclease domains (e.g., Cas9), with one of the two nuclease domains modified to lack catalytic activity or deleted. In some embodiments, the Cas nickase of a prime editor comprises a nuclease inactive RuvC domain and a nuclease active HNH domain. In some embodiments, the Cas nickase of a prime editor comprises a nuclease inactive HNH domain and a nuclease active RuvC domain. In some embodiments, a prime editor comprises a Cas9 nickase having an amino acid substitution in the RuvC domain. In some embodiments, the Cas9 nickase comprises a D10X amino acid substitution compared to a wild-type S. pyogenes Cas9 as set forth in SEQ ID NO: 2285, wherein X is any amino acid other than D. In some embodiments, a prime editor comprises a Cas9 nickase having an amino acid substitution in the HNH domain. In some embodiments, the Cas9 nickase comprises a H840X amino acid substitution compared to a wild-type S. pyogenes Cas9 as set forth in SEQ ID NO: 2285, wherein X is any amino acid other than H.

[0305] In some embodiments, a prime editor comprises a Cas protein that can bind to the target gene in a sequence-specific manner but lacks or has abolished nuclease activity and may not cleave either strand of a double-stranded DNA in a target gene. Abolished activity or lacking activity can refer to an enzymatic activity less than 1%, less than 2%, less than 3%, less than 4%, less than 5%, less than 6%, less than 7%, less than 8%, less than 9%, or less than 10% activity compared to a wild-type exemplary activity (e.g., wild-type Cas9 nuclease activity). In some embodiments, a Cas protein of a prime editor completely lacks nuclease activity. A nuclease, e.g., Cas9, that lacks nuclease activity may be referred to as nuclease inactive or “nuclease dead” (abbreviated by “d”). A nuclease dead Cas protein (e.g., dCas, dCas9) can bind to a target polynucleotide but may not cleave the target polynucleotide. In some aspects, a dead Cas protein is a dead Cas9 protein. In some embodiments, a prime editor comprises a nuclease dead Cas protein wherein all of the nuclease domains (e.g., both RuvC and HNH nuclease domains in a Cas9 protein; RuvC nuclease domain in a Cpf1 protein) are mutated to lack catalytic activity, or are deleted.

[0306] A Cas protein can be modified. A Cas protein, e.g., Cas9, can be modified to increase or decrease nucleic acid binding affinity, nucleic acid binding specificity, and/or enzymatic activity. Cas proteins can also be modified to change any other activity or property of the protein, such as stability. For example, one or more nuclease domains of the Cas protein can be modified, deleted, or inactivated, or a Cas protein can be truncated to remove domains that are not essential for the function of the protein or to optimize (e.g., enhance or reduce) the activity of the Cas protein.

[0307] A Cas protein can be a fusion protein. For example, a Cas protein can be fused to a cleavage domain, an epigenetic modification domain, a transcriptional regulation domain, or a polymerase domain. A Cas protein can also be fused to a heterologous polypeptide providing increased or decreased stability. The fused domain or heterologous polypeptide can be located at the N-terminus, the C-terminus, or internally within the Cas protein.

[0308] In some embodiments, the Cas protein of a prime editor is a Class 2 Cas protein. In some embodiments, the Cas protein is a type II Cas protein. In some embodiments, the Cas protein is a Cas9 protein, a modified version of a Cas9 protein, a Cas9 protein homolog, mutant, variant, or a functional fragment thereof. As used herein, a Cas9, Cas9 protein, Cas9 polypeptide or a Cas9 nuclease refers to an RNA guided nuclease comprising one or more Cas9 nuclease domains and a Cas9 gRNA binding domain having the ability to bind a guide polynucleotide, e.g., a PEgRNA. A Cas9 protein may refer to a wild-type Cas9 protein from any organism or a homolog, ortholog, or paralog from any organisms; any functional variants thereof; or any functional fragments or domains thereof. In some embodiments, a prime editor comprises a full-length Cas9 protein. In some embodiments, the Cas9 protein can generally comprises at least about 50%, 60%, 70%, 80%, 90%, 100% sequence identity to a wild-type reference Cas9 protein (e.g., Cas9 from S. pyogenes). In some embodiments, the Cas9 comprises an amino acid change such as a deletion, insertion, substitution, fusion, chimera, or any combination thereof as compared to a wild-type reference Cas9 protein.

[0309] In some embodiments, a Cas9 protein may comprise a Cas9 protein from Streptococcus pyogenes (Sp), Staphylococcus aureus (Sa), Streptococcus canis (Sc), Streptococcus thermophilus (St), Staphylococcus lugdunensis (Slu), Neisseria meningitidis (Nm), Campylobacter jejuni (Cj), Francisella novicida (Fn), or Treponema denticola (Td), or any Cas9 homolog or ortholog from an organism known in the art. In some embodiments, a Cas9 polypeptide is a SpCas9 polypeptide. In some embodiments, a Cas9 polypeptide is a SaCas9 polypeptide. In some embodiments, a Cas9 polypeptide is a ScCas9 polypeptide. In some embodiments, a Cas9 polypeptide is a StCas9 polypeptide. In some embodiments, a Cas9 polypeptide is a SluCas9 polypeptide. In some embodiments, a Cas9 polypeptide is a NmCas9 polypeptide. In some embodiments, a Cas9 polypeptide is a CjCas9 polypeptide. In some embodiments, a Cas9 polypeptide is a FnCas9 polypeptide. In some embodiments, a Cas9 polypeptide is a TdCas9 polypeptide. In some embodiments, a Cas9 polypeptide is a chimera comprising domains from two or more of the organisms described herein or those known in the art. In some embodiments, a Cas9 polypeptide is a Cas9 polypeptide from Streptococcus macacae. In some embodiments, a Cas9 polypeptide is a Cas9 polypeptide generated by replacing a PAM interaction domain of a SpCas9 with that of a Streptococcus macacae Cas9 (Spy-mac Cas9).

[0310] In some embodiments, a Cas9 is a chimeric Cas9, e.g., modified Cas9; e.g., synthetic RNA-guided nucleases (sRGNs), e.g., modified by DNA family shuffling, e.g., sRGN3.1, sRGN3.3. In some embodiments, the DNA family shuffling comprises, fragmentation and reassembly of parental Cas9 genes, e.g., one or more of Cas9s from Staphylococcus hyicus (Shy), Staphylococcus lugdunensis (Slu), Staphylococcus microti (Smi), and Staphylococcus pasteuri (Spa).

[0311] An exemplary wild-type Streptococcus pyogenes Cas9 (SpCas9) amino acid sequence is provided in SEQ ID NO: 2285.

[0312] In some embodiments, a prime editor comprises a Cas9 protein from Staphylococcus lugdunensis (Slu Cas9). An exemplary amino acid sequence of a wild-type Slu Cas9 is provided in SEQ ID NO: 2286.

[0313] In some embodiments, a Cas9 protein comprises a variant Cas9 protein containing one or more amino acid substitutions. In some embodiments, a wild-type Cas9 protein comprises a RuvC domain and an HNH domain. In some embodiments, a prime editor comprises a nuclease active Cas9 protein that may cleave both strands of a double-stranded target DNA sequence. In some embodiments, the nuclease active Cas9 protein comprises a functional RuvC domain and a functional HNH domain. In some embodiments, a prime editor comprises a Cas9 nickase that can bind to a guide polynucleotide and recognize a target DNA, but can cleave only one strand of a double-stranded target DNA. In some embodiments, the Cas9 nickase comprises only one functional RuvC domain or one functional HNH domain. In some embodiments, a prime editor comprises a Cas9 that has a non-functional HNH domain and a functional RuvC domain. In some embodiments, the prime editor can cleave the edit strand (i.e., the PAM strand), but not the non-edit strand of a double-stranded target DNA sequence. In some embodiments, a prime editor comprises a Cas9 having a non-functional RuvC domain that can cleave the target strand (i.e., the non-PAM strand), but not the edit strand of a double-stranded target DNA sequence. In some embodiments, a prime editor comprises a Cas9 that has neither a functional RuvC domain nor a functional HNH domain, which may not cleave any strand of a double-stranded target DNA sequence.

[0314] In some embodiments, a prime editor comprises a Cas9 having a mutation in the RuvC domain that reduces or abolishes the nuclease activity of the RuvC domain. In some embodiments, the Cas9 comprise a mutation at amino acid D10 as compared to a wild-type SpCas9 as set forth in SEQ ID NO: 2285, or a corresponding mutation thereof. In some embodiments, the Cas9 comprise a D10A mutation as compared to a wild-type SpCas9 as set forth in SEQ ID NO: 2285, or a corresponding mutation thereof. In some embodiments, the Cas9 polypeptide comprise a mutation at amino acid D10, G12, and/or G17 as compared to a wild-type SpCas9 as set forth in SEQ ID NO: 2285, or a corresponding mutation thereof. In some embodiments, the Cas9 polypeptide comprise a D10A mutation, a G12A mutation, and/or a G17A mutation as compared to a wild-type SpCas9 as set forth in SEQ ID NO: 2285, or a corresponding mutation thereof.

[0315] In some embodiments, a prime editor comprises a Cas9 polypeptide having a mutation in the HNH domain that reduces or abolishes the nuclease activity of the HNH domain. In some embodiments, the Cas9 polypeptide comprise a mutation at amino acid H840 as compared to a wild-type SpCas9 as set forth in SEQ ID NO: 2285, or a corresponding mutation thereof. In some embodiments, the Cas9 polypeptide comprise a H840A mutation as compared to a wild-type SpCas9 as set forth in SEQ ID NO: 2285, or a corresponding mutation thereof. In some embodiments, the Cas9 polypeptide comprises a mutation at amino acid E762, D839, H840, N854, N856, N863, H982, H983, A984, D986, and/or a A987 as compared to a wild-type SpCas9 as set forth in SEQ ID NO: 2285, or a corresponding mutation thereof. In some embodiments, the Cas9 polypeptide comprise a E762A, D839A, H840A, N854A, N856A, N863A, H982A, H983A, A984A, and/or a D986A mutation as compared to a wild-type SpCas9 as set forth in SEQ ID NO: 2285, or a corresponding mutation thereof.

[0316] In some embodiments, a prime editor comprises a Cas9 having one or more amino acid substitutions in both the HNH domain and the RuvC domain that reduce or abolish the nuclease activity of both the HNH domain and the RuvC domain. In some embodiments, the prime editor comprises a nuclease inactive Cas9, or a nuclease dead Cas9 (dCas9). In some embodiments, the dCas9 comprises a H840X substitution and a DOX mutation compared to a wild-type SpCas9 as set forth in SEQ ID NO: 2285 or corresponding mutations thereof, wherein X is any amino acid other than H for the H840X substitution and any amino acid other than D for the D10X substitution. In some embodiments, the dead Cas9 comprises a H840A and a DOA mutation as compared to a wild-type SpCas9 as set forth in SEQ ID NO: 2285, or corresponding mutations thereof.

[0317] In some embodiments, the N-terminal methionine is removed from a Cas9 nickase, or from any Cas9 variant, ortholog, or equivalent disclosed or contemplated herein. For example, methionine-minus Cas9 nickases, or a variant thereof having an amino acid sequence that has at least 80%, at least 85%, at least 90%, at least 95%, or at least 99% sequence identity thereto.

[0318] In some embodiments, a prime editor comprises a Streptococcus pyogenes Cas9 (SpCas9) having a nuclease inactivating mutation in the HNH domain (a SpCas9 nickase). In some embodiments, the SpCas9 nickase lacks the N-terminus methionine relative to a corresponding reference SpCas9 (e.g., wild type SpCas9). In some embodiments, a prime editor comprises a SpCas9 nickase having the sequences as provided in SEQ ID NO: 2287 (SpCas9 H840A nickase including the N-terminal methionine). In some embodiments, a prime editor comprises a SpCas9 nickase having the sequences as provided in SEQ ID NO: 2288 (SpCas9 H840A nickase lacking the N-terminal methionine).

[0319] In some embodiments, the SpCas9 nickase further comprises a R221K and/or a N394K amino acid substitution compared to a reference SpCas9 sequence set forth in SEQ ID NO: 2285 or 2287. In some embodiments, the SpCas9 nickase comprises a sequence as set forth in SEQ ID NO: 2289.

[0320] In some embodiments, a prime editor comprises a Staphylococcus lugdunensis (SluCas9) having a nuclease inactivating mutation in the HNH domain (a SluCas9 nickase). In some embodiments, the SluCas9 nickase lacks the N-terminus methionine relative to a corresponding reference SluCas9 (e.g., wild type SluCas9). In some embodiments, a prime editor comprises a SluCas9 nickase having the sequences as provided in SEQ ID NO: 2290 (SluCas9 H840A nickase including the N-terminal methionine). In some embodiments, a prime editor comprises a SluCas9 nickase having the sequences as provided in SEQ ID NO: 2291 (SluCas9 H840A nickase lacking the N-terminal methionine).

[0321] Besides dead Cas9 and Cas9 nickase variants, the Cas9 proteins used herein may also include other Cas9 variants having at least about 70% identity, at least about 80% identity, at least about 90% identity, at least about 95% identity, at least about 96% identity, at least about 97% identity, at least about 98% identity, at least about 99% identity, at least about 99.5% identity, or at least about 99.9% identity to any reference Cas9 protein, including any wild-type Cas9, or mutant Cas9 (e.g., a dead Cas9 or Cas9 nickase), or fragment Cas9, or circular permutant Cas9, or other variant of Cas9 disclosed herein or known in the art. In some embodiments, a Cas9 variant may have 1, 2, 3, 4, 5, 6, 7, 8, 9, 10, 11, 12, 13, 14, 15, 16, 17, 18, 19, 20, 21, 22, 21, 24, 25, 26, 27, 28, 29, 30, 31, 32, 33, 34, 35, 36, 37, 38, 39, 40, 41, 42, 43, 44, 45, 46, 47, 48, 49, 50 or more amino acid changes compared to a reference Cas9, e.g., a wild-type Cas9. In some embodiments, the Cas9 variant comprises a fragment of a reference Cas9 (e.g., a gRNA binding domain or a DNA-cleavage domain), such that the fragment is at least about 70% identical, at least about 80% identical, at least about 90% identical, at least about 95% identical, at least about 96% identical, at least about 97% identical, at least about 98% identical, at least about 99% identical, at least about 99.5% identical, or at least about 99.9% identical to the corresponding fragment of the reference Cas9, e.g., a wild-type Cas9. In some embodiments, the fragment is at least 30%, at least 35%, at least 40%, at least 45%, at least 50%, at least 55%, at least 60%, at least 65%, at least 70%, at least 75%, at least 80%, at least 85%, at least 90%, at least 95% identical, at least 96%, at least 97%, at least 98%, at least 99%, or at least 99.5% of the amino acid length of a corresponding wild-type Cas9.

[0322] In some embodiments, a Cas9 fragment is a functional fragment that retains one or more Cas9 activities. In some embodiments, the Cas9 fragment is at least 100 amino acids in length. In some embodiments, the fragment is at least 100, 150, 200, 250, 300, 350, 400, 450, 500, 550, 600, 650, 700, 750, 800, 850, 900, 950, 1000, 1050, 1100, 1150, 1200, 1250, or at least 1300 amino acids in length.

[0323] In some embodiments, a prime editor comprises a Cas protein, e.g., Cas9, containing modifications that allow altered PAM recognition. In prime editing using a Cas-protein-based prime editor, a “protospacer adjacent motif” (PAM), known as a PAM sequence, or PAM-like motif, may be used to refer to a short DNA sequence immediately following the protospacer on the PAM strand of the target gene. In some embodiments, the PAM is recognized by the Cas nuclease in the prime editor during prime editing. In certain embodiments, the PAM is required for target binding of the Cas protein. The specific PAM sequence required for Cas protein recognition may depend on the specific type of the Cas protein. A PAM can be 1, 2, 3, 4, 5, 6, 7, 8, 9, 10 or more nucleotides in length. In some embodiments, a PAM is between 2-6 nucleotides in length. In some embodiments, the PAM can be a 5′ PAM (i.e., located upstream of the 5′ end of the protospacer). In other embodiments, the PAM can be a 3′ PAM (i.e., located downstream of the 5′ end of the protospacer). In some embodiments, the Cas protein of a prime editor recognizes a canonical PAM, for example, a SpCas9 recognizes 5′-NGG-3′ PAM. In some embodiments, the Cas protein of a prime editor has altered or non-canonical PAM specificities. Exemplary PAM sequences and corresponding Cas variants are described in Table 60 below. It should be appreciated that for each of the variants provided, the Cas protein comprises one or more of the amino acid substitutions as indicated compared to a wild-type Cas protein sequence, for example, the SpCas9 as set forth in SEQ ID NO: 2285. The PAM motifs as shown in Table 60 below are in the order of 5′ to 3′. The nucleotides listed in Table 60 are represented by the base codes as provided in the Handbook on Industrial Property Information and Documentation, World Intellectual Property Organization (WIPO) Standard ST.26, Version 1.4. For example, an “R” in the right column of Table 60 represents the nucleotide A or G; “W” in Table 60 represents A or T; and “V” in Table 1 represents A, C, or G.

TABLE 60
Cas protein variants and corresponding PAM sequences

| Cas Variant | PAM |
|---|---|
| spCas9 (wild-type) | NGG, NGA, NAG |
| spCas9-VRVRFRR (also referred to as SpCas9- | NG |
| NG)R1335V/L1111R/D1135V/G1218R/E1219F/A1322R/T1337R | |
| spCas9-VQR (D1135V/R1335Q/T1337R) | NGA |
| spCas9-EQR (D1135E/R1335Q/T1337R) | NGA |
| spCas9-VRER (D1135V/G1218R/R1335E/T1337R) | NGCG |
| xCas9 (E480K, E543D, E1219V, K294R, Q1256K, A262T, | NGN |
| S409I, M694I) | |
| SluCa9 | NNGG |
| saCas9 | NNGRRT, NNGRRN |
| saCas9-KKH (E782K, N968K, R1015H) | NNNRRT |
| spCas9-MQKSER (D1135M, S1136Q, G1218K, E1219S, | NGCG/NGCN |
| R1335E, T1337R) | |
| spCas9-LRKIQK (D1135L, S1136R, G1218K, E1219I, R1335Q, | NGTN |
| T1337K) | |
| spCas9-LRVSQK (D1135L, S1136R, G1218V, E1219S, R1335Q, | NGTN |
| T1337K) | |
| spCas9-LRVSQL(D1135L, S1136R, G1218V, E1219S, R1335Q, | NGTN |
| T1337L) | |
| Cpf1 | TTTV |
| Spy-Mac | NAA |
| NmCas9 | NNNNGATT |
| StCas9 | NNAGAAW |
| TdCas9 | NAAAAC |
| spCas9-VRQR (D1135V, G1218R, R1335Q, T1337R) | NGA |
| SpG Cas9 (D1135L, S1136W, G1218K, E1219Q, R1335Q, | NGN |
| T1337R) | |
| SyRY Cas9 | NRN |
| (A61R, L1111R, N1317R, A1322R, and R1333P) | |
| sRGN1, sRGN2, sRGN4, sRGN3.1, sRGN3.3 | NNGG |

[0324] Exemplary Cas9s that allow alternative PAM recognition are provided in SEQ ID NO:2292 (SpCas9-NG), SEQ ID NO: 2293 (SpCas9-NG H840A nickase), SEQ ID NO: 2294 (SpCas9-NG H839A nickase lacking N-terminal methionine), SEQ ID NO: 2295 (SpCas9-VRQR), SEQ ID NO: 2296 (SpCas9-VRQR H840A nickase), SEQ ID NO: 2297 (SpCas9-VRQR H839A nickase lacking N-terminal methionine), SEQ ID NO: 2298 (SpRY Cas9), SEQ ID NO: 2299 (SpRY Cas9 H840A nickase), SEQ ID NO: 2300 (SpRY Cas9 H839A nickase lacking N-terminal methionine), SEQ ID NO: 2301 (sRGN3.1), SEQ ID NO: 2302 (sRGN3.1 N585A nickase), SEQ ID NO: 2303 (sRNA3.1 N584A nickase lacking N-terminal methionine), SEQ ID NO: 2304 (sRGN3.3), SEQ ID NO: 2305 (sRGN3.3 N585A nickase), SEQ ID NO: 2306 (sRGN3.3 N584A nickase lacking N-terminal methionine), SEQ ID NO:2307 (SpG Cas9), SEQ ID NO: 2308 (SpG Cas9 H840A nickcase), and SEQ ID NO: 2309 (SpG Cas9 H839A nickase lacking N-terminal methionine). Cas wild-type and variant sequences can be found in Table 61 below. In some embodiments, a prime editor comprises a Cas9 polypeptide comprising one or more mutations selected from the group consisting of: A61R, L111R, D1135V, R221K, A262T, R324L, N394K, S409I, S409I, E427G, E480K, M495V, N497A, Y515N, K526E, F539S, E543D, R654L, R661A, R661L, R691A, N692A, M694A, M694I, Q695A, H698A, R753G, M763I, K848A, K890N, Q926A, K1003A, R1060A, L1111R, R1114G, D1135E, D1135L, D1135N, S1136W, V1139A, D1180G, G1218K, G1218R, G1218S, E1219Q, E1219V, E1219V, Q1221H, P1249S, E1253K, N1317R, A1320V, P1321S, A1322R, I1322V, D1332G, R1332N, A1332R, R1333K, R1333P, R1335L, R1335Q, R1335V, T1337N, T1337R, S1338T, H1349R, and any combinations thereof as compared to a wild-type SpCas9 polypeptide as set forth in SEQ ID NO:2285.

[0325] In some embodiments, a prime editor comprises a SaCas9 polypeptide. In some embodiments, the SaCas9 polypeptide comprises one or more of mutations E782K, N968K, and R1015H as compared to a wild-type SaCas9. In some embodiments, a prime editor comprises a FnCas9 polypeptide, for example, a wild-type FnCas9 polypeptide or a FnCas9 polypeptide comprising one or more of mutations E1369R, E1449H, or R1556A as compared to the wild-type FnCas9. In some embodiments, a prime editor comprises a Sc Cas9, for example, a wild-type ScCas9 or a ScCas9 polypeptide comprises one or more of mutations I367K, G368D, I369K, H371L, T375S, T376G, and T1227K as compared to the wild-type ScCas9. In some embodiments, a prime editor comprises a St1 Cas9 polypeptide, a St3 Cas9 polypeptide, or a Slu Cas9 polypeptide.

[0326] In some embodiments, a prime editor comprises a Cas polypeptide that comprises a circular permutant Cas variant. For example, a Cas9 polypeptide of a prime editor may be engineered such that the N-terminus and the C-terminus of a Cas9 protein (e.g., a wild-type Cas9 protein, or a Cas9 nickase) are topically rearranged to retain the ability to bind DNA when complexed with a guide RNA (gRNA). An exemplary circular permutant configuration may be N-terminus-[original C-terminus]-[original N-terminus]-C-terminus. Any of the Cas9 proteins described herein, including any variant, ortholog, or naturally occurring Cas9 or equivalent thereof, may be reconfigured as a circular permutant variant.

[0327] In various embodiments, the circular permutants of a Cas protein, e.g., a Cas9, may have the following structure: N-terminus-[original C-terminus]-[optional linker]-[original N-terminus]-C-terminus. In some embodiments, a circular permutant Cas9 comprises any one of the following structures (amino acid positions as set forth in SEQ ID NO: 2285):
[0328] N-terminus-[1268-1368]-[optional linker]-[1-1267]-C-terminus;
[0329] N-terminus-[1168-1368]-[optional linker]-[1-1167]-C-terminus;
[0330] N-terminus-[1068-1368]-[optional linker]-[1-1067]-C-terminus;
[0331] N-terminus-[968-1368]-[optional linker]-[1-967]-C-terminus;
[0332] N-terminus-[868-1368]-[optional linker]-[1-867]-C-terminus;
[0333] N-terminus-[768-1368]-[optional linker]-[1-767]-C-terminus;
[0334] N-terminus-[668-1368]-[optional linker]-[1-667]-C-terminus;
[0335] N-terminus-[568-1368]-[optional linker]-[1-567]-C-terminus;
[0336] N-terminus-[468-1368]-[optional linker]-[1-467]-C-terminus;
[0337] N-terminus-[368-1368]-[optional linker]-[1-367]-C-terminus;
[0338] N-terminus-[268-1368]-[optional linker]-[1-267]-C-terminus;
[0339] N-terminus-[168-1368]-[optional linker]-[1-167]-C-terminus;
[0340] N-terminus-[68-1368]-[optional linker]-[1-67]-C-terminus;
[0341] N-terminus-[10-1368]-[optional linker]-[1-9]-C-terminus, or the corresponding circular permutants of other Cas9 proteins (including other Cas9 orthologs, variants, etc).

[0342] In some embodiments, a circular permutant Cas9 comprises any one of the following structures (amino acid positions as set forth in SEQ ID NO: 2285:
[0343] N-terminus-[102-1368]-[optional linker]-[1-101]-C-terminus;
[0344] N-terminus-[1028-1368]-[optional linker]-[1-1027]-C-terminus;
[0345] N-terminus-[1041-1368]-[optional linker]-[1-1043]-C-terminus;
[0346] N-terminus-[1249-1368]-[optional linker]-[1-1248]-C-terminus;
[0347] N-terminus-[1300-1368]-[optional linker]-[1-1299]-C-terminus, or the corresponding circular permutants of other Cas9 proteins (including other Cas9 orthologs, variants, etc).

[0348] In some embodiments, a circular permutant Cas9 comprises any one of the following structures (amino acid positions as set forth in SEQ ID NO: 2285:
[0349] N-terminus-[103-1368]-[optional linker]-[1-102]-C-terminus;
[0350] N-terminus-[1029-1368]-[optional linker]-[1-1028]-C-terminus;
[0351] N-terminus-[1042-1368]-[optional linker]-[1-1041]-C-terminus;
[0352] N-terminus-[1250-1368]-[optional linker]-[1-1249]-C-terminus; or
[0353] N-terminus-[1301-1368]-[optional linker]-[1-1300]-C-terminus, or the corresponding circular permutants of other Cas9 proteins (including other Cas9 orthologs, variants, etc).

[0354] In some embodiments, the circular permutant can be formed by linking a C-terminal fragment of a Cas9 to an N-terminal fragment of a Cas9, either directly or by using a linker, such as an amino acid linker. In some embodiments, the C-terminal fragment may correspond to the C-terminal 95% or more of the amino acids of a Cas9 (e.g., amino acids about 1300-1368 as set forth in SEQ ID NO: 2285 or corresponding amino acid positions thereof), or the C-terminal 90%, 85%, 80%, 75%, 70%, 65%, 60%, 55%, 50%, 45%, 40%, 35%, 30%, 25%, 20%, 15%, 10%, or 5% or more of a Cas9. The N-terminal portion may correspond to the N-terminal 95% or more of the amino acids of a Cas9 (e.g., amino acids about 1-1300 as set forth in SEQ ID NO: 2285 or corresponding amino acid positions thereof), or the N-terminal 90%, 85%, 80%, 75%, 70%, 65%, 60%, 55%, 50%, 45%, 40%, 35%, 30%, 25%, 20%, 15%, 10%, or 5% or more of a Cas9 (e.g., as set forth in SEQ ID NO:2285 or corresponding amino acid positions thereof).

[0355] In some embodiments, the circular permutant can be formed by linking a C-terminal fragment of a Cas9 to an N-terminal fragment of a Cas9, either directly or by using a linker, such as an amino acid linker. In some embodiments, the C-terminal fragment that is rearranged to the N-terminus includes or corresponds to the C-terminal 30% or less of the amino acids of a Cas9 (e.g., amino acids 1012-1368 as set forth in SEQ ID NO: 2285 or corresponding amino acid positions thereof). In some embodiments, the C-terminal fragment that is rearranged to the N-terminus, includes or corresponds to the C-terminal 30%, 29%, 28%, 27%, 26%, 25%, 24%, 23%, 22%, 21%, 20%, 19%, 18%, 17%, 16%, 15%, 14%, 13%, 12%, 110%, 10%, 9%, 8%, 7%, 6%, 5%, 4%, 3%, 2%, or 1% of the amino acids of a Cas9 (e.g., as set forth in SEQ ID NO: 5143 or corresponding amino acid positions thereof). In some embodiments, the C-terminal fragment that is rearranged to the N-terminus, includes or corresponds to the C-terminal 410 residues or less of a Cas9 (e.g., as set forth in SEQ ID NO: 2285 or corresponding amino acid positions thereof). In some embodiments, the C-terminal portion that is rearranged to the N-terminus, includes or corresponds to the C-terminal 410, 400, 390, 380, 370, 360, 350, 340, 330, 320, 310, 300, 290, 280, 270, 260, 250, 240, 230, 220, 210, 200, 190, 180, 170, 160, 150, 140, 130, 120, 110, 100, 90, 80, 70, 60, 50, 40, 30, 20, or 10 residues of a Cas9 (e.g., as set forth in SEQ ID NO: 2285 or corresponding amino acid positions thereof). In some embodiments, the C-terminal portion that is rearranged to the N-terminus includes or corresponds to the C-terminal 357, 341, 328, 120, or 69 residues of a Cas9 (e.g., as set forth in SEQ ID NO: 2285 or corresponding amino acid positions thereof).

[0356] In other embodiments, circular permutant Cas9 variants may be a topological rearrangement of a Cas9 primary structure based on the following method, which is based on S. pyogenes Cas9 of SEQ ID NO: 2285: (a) selecting a circular permutant (CP) site corresponding to an internal amino acid residue of the Cas9 primary structure, which dissects the original protein into two halves: an N-terminal region and a C-terminal region; (b) modifying the Cas9 protein sequence (e.g., by genetic engineering techniques) by moving the original C-terminal region (comprising the CP site amino acid) to precede the original N-terminal region, thereby forming a new N-terminus of the Cas9 protein that now begins with the CP site amino acid residue. The CP site can be located in any domain of the Cas9 protein, including, for example, the helical-II domain, the RuvCIII domain, or the CTD domain. For example, the CP site may be located (as set forth in SEQ ID NO: 2285 or corresponding amino acid positions thereof) at original amino acid residue 181, 199, 230, 270, 310, 1010, 1016, 1023, 1029, 1041, 1247, 1249, or 1282. Thus, once relocated to the N-terminus, original amino acid 181, 199, 230, 270, 310, 1010, 1016, 1023, 1029, 1041, 1247, 1249, or 1282 would become the new N-terminal amino acid. Nomenclature of these CP-Cas9 proteins may be referred to as Cas9-CP¹⁸¹, Cas9-CP¹⁹⁹, Cas9-CP²³⁰, Cas9-CP²⁷⁰, Cas9-CP³¹⁰, Cas9-CP¹⁰¹⁰, Cas9-CP¹⁰¹⁶, Cas9-CP¹⁰²³, Cas9-CP¹⁰²⁹, Cas9-CP¹⁰⁴¹, Cas9-CP¹²⁴⁷, Cas9-CP¹²⁴⁹, and Cas9-CP¹²⁸², respectively. This description is not meant to be limited to making CP variants from SEQ ID NO: 2285, but may be implemented to make CP variants in any Cas9 sequence, either at CP sites that correspond to these positions, or at other CP sites entirely. This description is not meant to limit the specific CP sites in any way. Virtually any CP site may be used to form a CP-Cas9 variant.

[0357] In some embodiments, a prime editor comprises a Cas9 functional variant that is of smaller molecular weight than a wild-type SpCas9 protein. In some embodiments, a smaller-sized Cas9 functional variant may facilitate delivery to cells, e.g., by an expression vector, nanoparticle, or other means of delivery. In certain embodiments, a smaller-sized Cas9 functional variant is a Class 2 Type II Cas protein. In certain embodiments, a smaller-sized Cas9 functional variant is a Class 2 Type V Cas protein. In certain embodiments, a smaller-sized Cas9 functional variant is a Class 2 Type VI Cas protein.

[0358] In some embodiments, a prime editor comprises a SpCas9 that is 1368 amino acids in length and has a predicted molecular weight of 158 kilodaltons. In some embodiments, a prime editor comprises a Cas9 functional variant or functional fragment that is less than 1300 amino acids, less than 1290 amino acids, than less than 1280 amino acids, less than 1270 amino acids, less than 1260 amino acid, less than 1250 amino acids, less than 1240 amino acids, less than 1230 amino acids, less than 1220 amino acids, less than 1210 amino acids, less than 1200 amino acids, less than 1190 amino acids, less than 1180 amino acids, less than 1170 amino acids, less than 1160 amino acids, less than 1150 amino acids, less than 1140 amino acids, less than 1130 amino acids, less than 1120 amino acids, less than 1110 amino acids, less than 1100 amino acids, less than 1050 amino acids, less than 1000 amino acids, less than 950 amino acids, less than 900 amino acids, less than 850 amino acids, less than 800 amino acids, less than 750 amino acids, less than 700 amino acids, less than 650 amino acids, less than 600 amino acids, less than 550 amino acids, or less than 500 amino acids, but at least larger than about 400 amino acids and retaining the one or more functions, e.g., DNA binding function, of the Cas9 protein. In some embodiments, the Cas protein may include any CRISPR associated protein, including but not limited to, Cas12a, Cas12b1, Cas1, Cas1B, Cas2, Cas3, Cas4, Cas5, Cas6, Cas7, Cas8, Cas9 (also known as Csn1 and Csx12), Cas10, Csy1, Csy2, Csy3, Cse1, Cse2, Csc1, Csc2, Csa5, Csn2, Csm2, Csm3, Csm4, Csm5, Csm6, Cmr1, Cmr3, Cmr4, Cmr5, Cmr6, Csb1, Csb2, Csb3, Csx17, Csx14, Csx10, Csx16, CsaX, Csx3, Csx1, Csx15, Csf1, Csf2, Csf3, Csf4, homologs thereof, or modified versions thereof, and preferably comprising a nickase mutation (e.g., a mutation corresponding to the D10A mutation of the wild-type Cas9 polypeptide of SEQ ID NO: 2285). In various other embodiments, the polypeptide domain having DNA binding activity can be any of the following proteins: a Cas9, a Cas12a (Cpf1), a Cas12e (CasX), a Cas12d (CasY), a Cas12b1 (C2c1), a Cas13a (C2c2), a Cas12c (C2c3), a GeoCas9, a CjCas9, a Cas12g, a Cas12h, a Cas12i, a Cas13b, a Cas13c, a Cas13d, a Cas14, a Csn2, an xCas9, an SpCas9-NG, a circularly permuted Cas9, or an Argonaute (Ago) domain, or a functional variant or fragment thereof. Exemplary Cas proteins and nomenclature are shown in Table 61 below.

TABLE 61
Exemplary Cas proteins and nomenclature

| | |
|---|---|
| Legacy nomenclature | Current nomenclature |

type II CRISPR-Cas enzymes

| | |
|---|---|
| Cas9 | same |

type V CRISPR-Cas enzymes

| | |
|---|---|
| Cpf1 | Cas12a |
| CasX | Cas12e |
| C2c1 | Cas12b1 |
| Cas12b2 | same |
| C2c3 | Cas12c |
| CasY | Cas12d |
| C2c4 | same |
| C2c8 | same |
| C2c5 | same |
| C2c10 | same |
| C2c9 | same |

type VI CRISPR-Cas enzymes

| | |
|---|---|
| C2c2 | Cas13a |
| Cas13d | same |
| C2c7 | Cas13c |
| C2c6 | Cas13b |

[0359] In some embodiments, a prime editor as described herein may comprise a Cas12a (Cpf1) polypeptide or functional variants thereof. In some embodiments, the Cas12a polypeptide comprises a mutation that reduces or abolishes the endonuclease domain of the Cas12a polypeptide. In some embodiments, the Cas12a polypeptide is a Cas12a nickase. In some embodiments, the Cas protein comprises an amino acid sequence that comprises at least about 50%, 60%, 70%, 80%, 90%, 91%, 92%, 93%, 94%, 95%, 96%, 97%, 98%, 99%, or 100% sequence identity to a naturally occurring Cas12a polypeptide.

[0360] In some embodiments, a prime editor comprises a Cas protein that is a Cas12b (C2c1) or a Cas12c (C2c3) polypeptide. In some embodiments, the Cas protein comprises an amino acid sequence that comprises at least about 50%, 60%, 70%, 80%, 90%, 91%, 92%, 93%, 94%, 95%, 96%, 97%, 98%, 99%, or 100% sequence identity to a naturally occurring Cas12b (C2c1) or Cas12c (C2c3) protein. In some embodiments, the Cas protein is a Cas12b nickase or a Cas12c nickase. In some embodiments, the Cas protein is a Cas12e, a Cas12d, a Cas13, Cas14a, Cas14b, Cas14c, Cas14d, Cas14e, Cas14f, Cas14g, Cas14h, Cas14u, or a CasΦ polypeptide. In some embodiments, the Cas protein comprises an amino acid sequence that comprises at least about 50%, 60%, 70%, 80%, 90%, 91%, 92%, 93%, 94%, 95%, 96%, 97%, 98%, 99%, or 100% sequence identity to a naturally-occurring Cas12e, Cas12d, Cas13, Cas14a, Cas14b, Cas14c, Cas14d, Cas14e, Cas14f, Cas14g, Cas14h, Cas14u, or Cas Φ protein. In some embodiments, the Cas protein is a Cas12e, Cas12d, Cas13, or Cas Φ nickase.

### Flap Endonuclease

[0361] In some embodiments, a prime editor further comprises additional polypeptide components, for example, a flap endonuclease (FEN), e.g., FEN1. In some embodiments, the flap endonuclease excises the 5′ single-stranded DNA of the edit strand of the target gene and assists incorporation of the intended nucleotide edit into the target gene. In some embodiments, the FEN is linked or fused to another component. In some embodiments, the FEN is provided in trans, for example, as a separate polypeptide or polynucleotide encoding the FEN.

[0362] In some embodiments, a prime editor or prime editing composition comprises a flap nuclease. In some embodiments, the flap nuclease is a FEN1, or any FEN1 functional variant, functional mutant, or functional fragment thereof. In some embodiments, the flap nuclease is a TREX2, EXO1, or any other flap nuclease known in the art, or any functional variant, functional mutant, or functional fragment thereof. In some embodiments, the flap nuclease has an amino acid sequence that is at least about 70% identical, at least about 80% identical, at least about 90% identical, at least about 95% identical, at least about 96% identical, at least about 97% identical, at least about 98% identical, at least about 99% identical, at least about 99.5% identical, or at least about 99.9% identical to any of the flap nucleases described herein or known in the art.

### Nuclear Localization Sequences

[0363] In some embodiments, a prime editor further comprises one or more nuclear localization sequence (NLS). In some embodiments, the NLS helps promote translocation of a protein into the cell nucleus. In some embodiments, a prime editor comprises a fusion protein, e.g., a fusion protein comprising a DNA binding domain and a DNA polymerase that comprises one or more NLSs. In some embodiments, one or more polypeptides of the prime editor are fused to or linked to one or more NLSs. In some embodiments, the prime editor comprises a DNA binding domain and a DNA polymerase domain that are provided in trans, wherein the DNA binding domain and/or the DNA polymerase domain is fused or linked to one or more NLSs.

[0364] In certain embodiments, a prime editor or prime editing composition comprises at least one NLS. In some embodiments, a prime editor or prime editing composition comprises at least two NLSs. In embodiments with at least two NLSs, the NLSs can be the same NLS, or they can be different NLSs.

[0365] In some instances, a prime editor may further comprise at least one nuclear localization sequence (NLS). In some cases, a prime editor may further comprise one NLS. In some cases, a prime editor may further comprise two NLSs. In other cases, a prime editor may further comprise three NLSs. In one case, a primer editor may further comprise more than 4, 5, 6, 7, 8, 9 or 10 NLSs.

[0366] In addition, the NLSs may be expressed as part of a prime editor or prime editing composition. In some embodiments, a NLS can be positioned almost anywhere in a protein's amino acid sequence, and generally comprises a short sequence of three or more or four or more amino acids. The location of the NLS fusion can be at the N-terminus, the C-terminus, or positioned anywhere within a sequence of a prime editor or a component thereof (e.g., inserted between the DNA-binding domain and the DNA polymerase domain of a prime editor fusion protein, between the DNA binding domain and a linker sequence, between a DNA polymerase and a linker sequence, between two linker sequences of a prime editor fusion protein or a component thereof, in either N-terminus to C-terminus or C-terminus to N-terminus order). In some embodiments, a prime editor is a fusion protein that comprises an NLS at the N terminus. In some embodiments, a prime editor is a fusion protein that comprises an NLS at the C terminus. In some embodiments, a prime editor is a fusion protein that comprises at least one NLS at both the N terminus and the C terminus. In some embodiments, the prime editor is a fusion protein that comprises two NLSs at the N terminus and/or the C terminus.

[0367] Any NLSs that are known in the art are also contemplated herein. The NLSs may be any naturally occurring NLS, or any non-naturally occurring NLS (e.g., an NLS with one or more mutations relative to a wild-type NLS). In some embodiments, the one or more NLSs of a prime editor comprise bipartite NLSs. In some embodiments, a nuclear localization signal (NLS) is predominantly basic. In some embodiments, the one or more NLSs of a prime editor are rich in lysine and arginine residues. In some embodiments, the one or more NLSs of a prime editor comprise proline residues. In some embodiments, a nuclear localization signal (NLS) comprises the sequence MDSLLMNRRKFLYQFKNVRWAKGRRETYLC (SEQ ID NO: 2310), MKRTADGSEFESPKKKRKV (SEQ ID NO: 2311), KRTADGSEFEPKKKRKV (SEQ ID NO: 2312, NLSKRPAAIKKAGQAKKKK (SEQ ID NO: 2313), RQRRNELKRSF (SEQ ID NO: 2314), or NQSSNFGPMKGGNFGGRSSGPYGGGGQYFAKPRNQGGY (SEQ ID NO: 2315).

[0368] In some embodiments, a NLS is a monopartite NLS. For example, in some embodiments, a NLS is a SV40 large T antigen NLS (PKKKRKV (SEQ ID NO: 2316). In some embodiments, a NLS is a bipartite NLS. In some embodiments, a bipartite NLS comprises two basic domains separated by a linker comprising a variable number of amino acids. In some embodiments, a NLS is a bipartite NLS. In some embodiments, a bipartite NLS consists of two basic domains separated by a linker comprising a variable number of amino acids. In some embodiments, the linker amino acid sequence comprises the sequence KRXXXXXXXXXXKKKL (SEQ ID NO: 2317), wherein X is any amino acid. In some embodiments, the NLS comprises a nucleoplasmin NLS sequence KRPAATKKAGQAKKKK (SEQ ID NO: 2318). In some embodiments, a NLS is a noncanonical sequences such as M9 of the hnRNP A1 protein, the influenza virus nucleoprotein NLS, and the yeast Gal4 protein NLS.

[0369] Other non-limiting examples of NLS sequences are provided in Table 62 below.

TABLE 62
Exemplary nuclear localization sequences

| SEQ ID NO: | Description | Sequence |
|---|---|---|
| 2310 | NLS of SV40 Large | MDSLLMNRRKFLYQFKNVRWAKGRRETYLC |
| | T-AG | |
| 2311 | NLS | MKRTADGSEFESPKKKRKV |
| 2316 | NLS | PKKKRKV |
| 2319 | NLS of | AVKRPAATKKAGQAKKKKLD |
| | Nucleoplasmin | |
| 2320 | NLS of EGL-13 | MSRRRKANPTKLSENAKKLAKEVEN |
| 2321 | NLS of C-Myc | PAAKRVKLD |
| 2322 | NLS of Tus-protein | KLKIKRPVK |
| 2323 | NLS of polyoma | VSRKRPRP |
| | large T-AG | |
| 2324 | NLS of Hepatitis D | EGAPPAKRAR |
| | virus antigen | |
| 2325 | NLS of murine p53 | PPQPKKKPLDGE |
| 2326 | C-terminal NLS and | SGGSKRTADGSEFEPKKKRKV |
| | linker for exemplary | |
| | PE fusion protein | |

### Additional Prime Editor Components

[0370] A prime editor described herein may comprise additional functional domains, for example, one or more domains that modify the folding, solubility, or charge of the prime editor. In some instances, the prime editor may comprise a solubility-enhancement (SET) domain.

[0371] In some embodiments, a split intein comprises two halves of an intein protein, which may be referred to as a N-terminal half of an intein, or intein-N, and a C-terminal half of an intein, or intein-C, respectively. In some embodiments, the intein-N and the intein-C may each be fused to a protein domain (the N-terminal and the C-terminal exteins). The exteins can be any protein or polypeptides, for example, any prime editor polypeptide component. In some embodiments, the intein-N and intein-C of a split intein can associate non-covalently to form an active intein and catalyze a trans-splicing reaction. In some embodiments, the trans-splicing reaction excises the two intein sequences and links the two extein sequences with a peptide bond. As a result, the intein-N and the intein-C are spliced out, and a protein domain linked to the intein-N is fused to a protein domain linked to the intein-C essentially in same way as a contiguous intein does. In some embodiments, a split-intein is derived from a eukaryotic intein, a bacterial intein, or an archaeal intein. Preferably, the split intein so-derived will possess only the amino acid sequences essential for catalyzing trans-splicing reactions. In some embodiments, an intein-N or an intein-C further comprise one or more amino acid substitutions as compared to a wild-type intein-N or wild-type intein-C, for example, amino acid substitutions that enhances the trans-splicing activity of the split intein. In some embodiments, the intein-C comprises 4 to 7 contiguous amino acid residues, wherein at least 4 amino acids of which are from the last β-strand of the intein from which it was derived. In some embodiments, the split intein is derived from a Ssp DnaE intein, e.g., Synechocytis sp. PCC6803, or any intein or split intein known in the art, or any functional variants or fragments thereof.

[0372] In some embodiments, a prime editor comprises one or more epitope tags. Non-limiting examples of epitope tags include histidine (His) tags, V5 tags, FLAG tags, influenza hemagglutinin (HA) tags, Myc tags, VSV-G tags, thioredoxin (Trx) tags, biotin carboxylase carrier protein (BCCP) tags, myc-tags, calmodulin-tags, polyhistidine tags, also referred to as histidine tags or His-tags, maltose binding protein (MBP)-tags, nus-tags, glutathione-S-transferase (GST)-tags, green fluorescent protein (GFP)-tags, thioredoxin-tags, S-tags, Softags (e.g., Softag 1, Softag 3), strep-tags, biotin ligase tags, FlAsH tags, V5 tags, and SBP-tags. Additional suitable sequences will be apparent to those of skill in the art. In some embodiments, the fusion protein comprises one or more His tags.

[0373] In some embodiments, a prime editor comprises one or more polypeptide domains encoded by one or more reporter genes. Examples of reporter genes include, but are not limited to, glutathione-S-transferase (GST), horseradish peroxidase (HRP), chloramphenicol acetyltransferase (CAT), beta-galactosidase, beta-glucuronidase, luciferase, green fluorescent protein (GFP), HcRed, DsRed, cyan fluorescent protein (CFP), yellow fluorescent protein (YFP), and autofluorescent proteins, including blue fluorescent protein (BFP).

[0374] In some embodiments, a prime editor comprises one or more polypeptide domains that binds DNA molecules or binds other cellular molecules. Examples of binding proteins or domains include, but are not limited to, maltose binding protein (MBP), S-tag, Lex A DNA binding domain (DBD) fusions, GAL4 DNA binding domain fusions, and herpes simplex virus (HSV) BP16 protein fusions.

[0375] Polypeptides comprising components of a prime editor may be fused via peptide linkers, or may be provided in trans relative to each other. For example, a reverse transcriptase may be expressed, delivered, or otherwise provided as an individual component rather than as a part of a fusion protein with the DNA binding domain. In such cases, components of the prime editor may be associated through non-peptide linkages or co-localization functions. In some embodiments, a prime editor further comprises additional components capable of interacting with, associating with, or capable of recruiting other components of the prime editor or the prime editing system. For example, a prime editor may comprise an RNA-protein recruitment polypeptide that can associate with an RNA-protein recruitment RNA aptamer. In some embodiments, an RNA-protein recruitment polypeptide can recruit, or be recruited by, a specific RNA sequence. Non limiting examples of RNA-protein recruitment polypeptide and RNA aptamer pairs include a MS2 coat protein and a MS2 RNA hairpin, a PCP polypeptide and a PP7 RNA hairpin, a Com polypeptide and a Com RNA hairpin, a Ku protein and a telomerase Ku binding RNA motif, and a Sm7 protein and a telomerase Sm7 binding RNA motif. In some embodiments, the prime editor comprises a DNA binding domain fused or linked to an RNA-protein recruitment polypeptide. In some embodiments, the prime editor comprises a DNA polymerase domain fused or linked to an RNA-protein recruitment polypeptide. In some embodiments, the DNA binding domain and the DNA polymerase domain fused to the RNA-protein recruitment polypeptide, or the DNA binding domain fused to the RNA-protein recruitment polypeptide and the DNA polymerase domain are co-localized by the corresponding RNA-protein recruitment RNA aptamer of the RNA-protein recruitment polypeptide. In some embodiments, the corresponding RNA-protein recruitment RNA aptamer is fused or linked to a portion of the PEgRNA. For example, an MS2 coat protein may be fused or linked to the DNA polymerase and a MS2 hairpin installed on the PEgRNA for co-localization of the DNA polymerase and the RNA-guided DNA binding domain (e.g., a Cas9 nickase).

[0376] In some embodiments, a prime editor comprises a polypeptide domain, an MS2 coat protein (MCP or MS2cp), that recognizes an MS2 hairpin. In some embodiments, the nucleotide sequence of the MS2 hairpin (or equivalently referred to as the “MS2 aptamer”) is: GCCAACATGAGGATCACCCATGTCTGCAGGGCC (SEQ ID NO: 2327). In some embodiments, the amino acid sequence of the MCP is:

(SEQ ID NO: 2328)
GSASNFTQFVLVDNGGTGDVTVAPSNFANGVAEWISSNSRSQAYKVTCS
VRQSSAQNRKYTIKVEVPKVATQTVGGEELPVAGWRSYLNMELTIPIFA
TNSDCELIVKAMQGLLKDGNPIPSAIAANSGIY.

[0377] In certain embodiments, components of a prime editor are directly fused to each other. In certain embodiments, components of a prime editor are associated to each other via a linker.

[0378] As used herein, a linker can be any chemical group or a molecule linking two molecules or moieties, e.g., a DNA binding domain and a polymerase domain of a prime editor. In some embodiments, a linker is an organic molecule, group, polymer, or chemical moiety. In some embodiments, the linker comprises a non-peptide moiety. The linker may be as simple as a covalent bond, or it may be a polymeric linker many atoms in length, for example, a polynucleotide sequence. In certain embodiments, the linker is a covalent bond (e.g., a carbon-carbon bond, disulfide bond, carbon-heteroatom bond).

[0379] In certain embodiments, two or more components of a prime editor are linked to each other by a peptide linker. In some embodiments, a peptide linker is 5-100 amino acids in length, for example, 2, 3, 4, 5, 6, 7, 8, 9, 10, 11, 12, 13, 14, 15, 16, 17, 18, 19, 20, 21, 22, 23, 24, 25, 26, 27, 28, 29, 30, 30-35, 35-40, 40-45, 45-50, 50-60, 60-70, 70-80, 80-90, 90-100, 100-150, or 150-200 amino acids in length. In some embodiments, the peptide linker is 16 amino acids in length, 24 amino acids in length, 64 amino acids in length, or 96 amino acids in length.

[0380] In some embodiments, the linker comprises the amino acid sequence (GGGGS)n (SEQ ID NO: 2329), (G)n (SEQ ID NO: 2330), (EAAAK)n (SEQ ID NO:2331), (GGS)n (SEQ ID NO: 2332), (SGGS)n (SEQ ID NO: 2333), (XP)n (SEQ ID NO: 2334), or any combination thereof, wherein n is independently an integer between 1 and 30, and wherein X is any amino acid. In some embodiments, the linker comprises the amino acid sequence (GGS)n (SEQ ID NO: 2332), wherein n is 1, 3, or 7. In some embodiments, the linker comprises the amino acid sequence SGSETPGTSESATPES (SEQ ID NO: 2335). In some embodiments, the linker comprises the amino acid sequence SGGSSGGSSGSETPGTSESATPESSGGSSGGS (SEQ ID NO: 2336). In some embodiments, the linker comprises the amino acid sequence SGGSGGSGGS (SEQ ID NO: 2337). In some embodiments, the linker comprises the amino acid sequence SGGS (SEQ ID NO: 2338). In other embodiments, the linker comprises the amino acid sequence

(SEQ ID NO: 2339)
SGGSSGGSSGSETPGTSESATPESAGSYPYDVPDYAGSAAPAAKKKKLD
GSGSGGSSGGS.

[0381] In certain embodiments, two or more components of a prime editor are linked to each other by a non-peptide linker. In some embodiments, the linker is a carbon-nitrogen bond of an amide linkage. In certain embodiments, the linker is a cyclic or acyclic, substituted or unsubstituted, branched or unbranched aliphatic or heteroaliphatic linker. In certain embodiments, the linker is polymeric (e.g., polyethylene, polyethylene glycol, polyamide, polyester). In certain embodiments, the linker comprises a monomer, dimer, or polymer of aminoalkanoic acid. In certain embodiments, the linker comprises an aminoalkanoic acid (e.g., glycine, ethanoic acid, alanine, beta-alanine, 3-aminopropanoic acid, 4-aminobutanoic acid, 5-pentanoic acid). In certain embodiments, the linker comprises a monomer, dimer, or polymer of aminohexanoic acid (Ahx). In certain embodiments, the linker is based on a carbocyclic moiety (e.g., cyclopentane, cyclohexane). In other embodiments, the linker comprises a polyethylene glycol moiety (PEG). In certain embodiments, the linker comprises an aryl or heteroaryl moiety. In certain embodiments, the linker is based on a phenyl ring. The linker may include functionalized moieties to facilitate attachment of a nucleophile (e.g., thiol, amino) from the peptide to the linker. Any electrophile may be used as part of the linker. Exemplary electrophiles include, but are not limited to, activated esters, activated amides, Michael acceptors, alkyl halides, aryl halides, acyl halides, and isothiocyanates.

[0382] Components of a prime editor may be connected to each other in any order. In some embodiments, the DNA binding domain and the DNA polymerase domain of a prime editor may be fused to form a fusion protein, or may be joined by a peptide or protein linker, in any order from the N terminus to the C terminus. In some embodiments, a prime editor comprises a DNA binding domain fused or linked to the C-terminal end of a DNA polymerase domain. In some embodiments, a prime editor comprises a DNA binding domain fused or linked to the N-terminal end of a DNA polymerase domain. In some embodiments, the prime editor comprises a fusion protein comprising the structure NH2-[DNA binding domain]-[DNA polymerase]-COOH; or NH2-[DNA polymerase]-[DNA binding domain]-COOH, wherein each instance of “]-[” indicates the presence of an optional linker sequence. In some embodiments, a prime editor comprises a fusion protein and a DNA polymerase domain provided in trans, wherein the fusion protein comprises the structure NH2-[DNA binding domain]-[RNA-protein recruitment polypeptide]-COOH. In some embodiments, a prime editor comprises a fusion protein and a DNA binding domain provided in trans, wherein the fusion protein comprises the structure NH2-[DNA polymerase domain]-[RNA-protein recruitment polypeptide]-COOH.

[0383] In some embodiments, a prime editor fusion protein, a polypeptide component of a prime editor, or a polynucleotide encoding the prime editor fusion protein or polypeptide component, may be split into an N-terminal half and a C-terminal half or polypeptides that encode the N-terminal half and the C terminal half, and provided to a target DNA in a cell separately. For example, in certain embodiments, a prime editor fusion protein may be split into a N-terminal and a C-terminal half for separate delivery in AAV vectors, and subsequently translated and colocalized in a target cell to reform the complete polypeptide or prime editor protein. In such cases, separate halves of a protein or a fusion protein may each comprise a split-intein to facilitate colocalization and reformation of the complete protein or fusion protein by the mechanism of intein facilitated trans-splicing. In some embodiments, a prime editor comprises a N-terminal half fused to an intein-N, and a C-terminal half fused to an intein-C, or polynucleotides or vectors (e.g., AAV vectors) encoding each thereof. When delivered and/or expressed in a target cell, the intein-N and the intein-C can be excised via protein trans-splicing, resulting in a complete prime editor fusion protein in the target cell. The amino acid sequence of exemplary prime editor fusion proteins and its individual components are shown in Tables 63 and 64.

[0384] In some embodiments, a prime editing composition comprises a fusion protein comprising a DNA binding domain (e.g., Cas9(H840A)) and a reverse transcriptase (e.g., a variant M-MLV RT) having the following structure: [NLS]-[Cas9(H840A)]-[linker]-[M-MLV_RT(D200N)(T330P)(L603W)(T306K)(W313F)], and one or more desired PEgRNAs. In some embodiments, the prime editing composition comprises a prime editor fusion proteins that have the amino acid sequence of SEQ ID NOs: 2343 and 2344.

[0385] In various embodiments, a prime editor fusion protein comprises an amino acid sequence that is at least about 70% identical, at least about 80% identical, at least about 90% identical, at least about 95% identical, at least about 96% identical, at least about 97% identical, at least about 98% identical, at least about 99% identical, at least about 99.5% identical, or at least about 99.9% identical to the exemplary PE fusion protein provided below, or any of the prime editor fusion sequences described herein or known in the art.

TABLE 63
Amino acid sequence of exemplary prime editor fusion protein and individual
components

| SEQ ID | | |
|---|---|---|
| NO: | DESCRIPTION | SEQUENCE |
| 2343 | Prime editor | MKRTADGSEFESPKKKRKVDKKYSIGLDIGTNSVGWAV |
| | FUSION | ITDEYKVPSKKFKVLGNTDRHSIKKNLIGALLFDSGET |
| | PROTEIN | AEATRLKRTARRRYTRRKNRICYLQEIFSNEMAKVDD |
| | CAS9(H840A)- | SFFHRLEESFLVEEDKKHERHPIFGNIVDEVAYHEKYP |
| | MMLV_RT | TIYHLRKKLVDSTDKADLRLIYLALAHMIKFRGHFLIE |
| | D200N T330P | GDLNPDNSDVDKLFIQLVQTYNQLFEENPINASGVDAK |
| | L603W T306K | AILSARLSKSRRLENLIAQLPGEKKNGLFGNLIALSLGL |
| | W313F | TPNFKSNFDLAEDAKLQLSKDTYDDDLDNLLAQIGDQ |
| | | YADLFLAAKNLSDAILLSDILRVNTEITKAPLSASMIKR |
| | | YDEHHQDLTLLKALVRQQLPEKYKEIFFDQSKNGYAG |
| | | YIDGGASQEEFYKFIKPILEKMDGTEELLVKLNREDLL |
| | | RKQRTFDNGSIPHQIHLGELHAILRRQEDFYPFLKDNR |
| | | EKIEKILTFRIPYYVGPLARGNSRFAWMTRKSEETITP |
| | | WNFEEVVDKGASAQSFIERMTNFDKNLPNEKVLPKHS |
| | | LLYEYFTVYNELTKVKYVTEGMRKPAFLSGEQKKAIV |
| | | DLLFKTNRKVTVKQLKEDYFKKIECFDSVEISGVEDRF |
| | | NASLGTYHDLLKIIKDKDFLDNEENEDILEDIVLTLTLF |
| | | EDREMIEERLKTYAHLFDDKVMKQLKRRRYTGWGR |
| | | LSRKLINGIRDKQSGKTILDFLKSDGFANRNFMQLIHD |
| | | DSLTFKEDIQKAQVSGQGDSLHEHIANLAGSPAIKKGI |
| | | LQTVKVVDELVKVMGRHKPENIVIEMARENQTTQKG |
| | | QKNSRERMKRIEEGIKELGSQILKEHPVENTQLQNEK |
| | | LYLYYLQNGRDMYVDQELDINRLSDYDVDAIVPQSFL |
| | | KDDSIDNKVLTRSDKNRGKSDNVPSEEVVKKMKNYW |
| | | RQLLNAKLITQRKFDNLTKAERGGLSELDKAGFIKRQ |
| | | LVETRQITKHVAQILDSRMNTKYDENDKLIREVKVITL |
| | | KSKLVSDFRKDFQFYKVREINNYHHAHDAYLNAVVGT |
| | | ALIKKYPKLESEFVYGDYKVYDVRKMIAKSEQEIGKA |
| | | TAKYFFYSNIMNFFKTEITLANGEIRKRPLIETNGETGE |
| | | IVWDKGRDFATVRKVLSMPQVNIVKKTEVQTGGFSK |
| | | ESILPKRNSDKLIARKKDWDPKKYGGFDSPTVAYSVL |
| | | VVAKVEKGKSKKLKSVKELLGITIMERSSFEKNPIDFL |
| | | EAKGYKEVKKDLIIKLPKYSLFELENGRKRMLASAGE |
| | | LQKGNELALPSKYVNFLYLASHYEKLKGSPEDNEQKQ |
| | | LFVEQHKHYLDEIIEQISEFSKRVILADANLDKVLSAYN |
| | | KHRDKPIREQAENIIHLFTLTNLGAPAAFKYFDTTIDR |
| | | KRYTSTKEVLDATLIHQSITGLYETRIDLSQLGGDSGG |
| | | SSGGSSGSETPGTSESATPESSGGSSGGSSTLNIEDEYRLH |
| | | ETSKEPDVSLGSTWLSDFPQAWAETGGMGLAVRQAPLIIPLK |
| | | ATSTPVSIKQYPMSQEARLGIKPHIQRLLDQGILVPCQSPWNT |
| | | PLLPVKKPGTNDYRPVQDLREVNKRVEDIHPTVPNPYNLLSG |
| | | LPPSHQWYTVLDLKDAFFCLRLHPTSQPLFAFEWRDPEMGI |
| | | SGQLTWTRLPQGFKNSPTLFNEALHRDLADFRIQHPDLILLQ |
| | | YVDDLLLAATSELDCQQGTRALLQTLGNLGYRASAKKAQICQ |
| | | KQVKYLGYLLKEGQRWLTEARKETVMGQPTPKTPRQLREFL |
| | | GKAGFCRLFIPGFAEMAAPLYPLTKPGTLFNWGPDQQKAYQ |
| | | EIKQALLTAPALGLPDLTKPFELFVDEKQGYAKGVLTQKLGP |
| | | WRRPVAYLSKKLDPVAAGWPPCLRMVAAIAVLTKDAGKLTM |
| | | GQPLVILAPHAVEALVKQPPDRWLSNARMTHYQALLLDTDR |
| | | VQFGPVVALNPATLLPLPEEGLQHNCLDILAEAHGTRPDLTD |
| | | QPLPDADHTWYTDGSSLLQEGQRKAGAAVTTETEVIWAKAL |
| | | PAGTSAQRAELIALTQALKMAEGKKLNVYTDSRYAFATAHIH |
| | | GEIYRRRGWLTSEGKEIKNKDEILALLKALFLPKRLSIIHCPG |
| | | HQKGHSAEARGNRMADQAARKAAITETPDTSTLLIENSSPSG |
| | | GSKRTADGSEFEPKKKRKV |
| | | KEY: |
| | | NUCLEAR LOCALIZATION SEQUENCE (NLS) |
| | | CAS9(H840A) |
| | | 33-AMINO ACID LINKER |
| | | M-MLV REVERSE TRANSCRIPTASE |
| 2311 | N- TERMINAL | MKRTADGSEFESPKKKRKV |
| | NLS | |
| 2288 | SpCAS9 | DKKYSIGLDIGTNSVGWAVITDEYKVPSKKFKVLGNTDR |
| | (H839A) (MET | HSIKKNLIGALLFDSGETAEATRLKRTARRRYTRRKNRIC |
| | MINUS) | YLQEIFSNEMAKVDDSFFHRLEESFLVEEDKKHERHPIFG |
| | | NIVDEVAYHEKYPTIYHLRKKLVDSTDKADLRLIYLALA |
| | | HMIKFRGHFLIEGDLNPDNSDVDKLFIQLVQTYNQLFEEN |
| | | PINASGVDAKAILSARLSKSRRLENLIAQLPGEKKNGLFG |
| | | NLIALSLGLTPNFKSNFDLAEDAKLQLSKDTYDDDLDNLL |
| | | AQIGDQYADLFLAAKNLSDAILLSDILRVNTEITKAPLSAS |
| | | MIKRYDEHHQDLTLLKALVRQQLPEKYKEIFFDQSKNGY |
| | | AGYIDGGASQEEFYKFIKPILEKMDGTEELLVKLNREDLL |
| | | RKQRTFDNGSIPHQIHLGELHAILRRQEDFYPFLKDNREKI |
| | | EKILTFRIPYYVGPLARGNSRFAWMTRKSEETITPWNFEE |
| | | VVDKGASAQSFIERMTNFDKNLPNEKVLPKHSLLYEYFT |
| | | VYNELTKVKYVTEGMRKPAFLSGEQKKAIVDLLFKTNRK |
| | | VTVKQLKEDYFKKIECFDSVEISGVEDRFNASLGTYHDLL |
| | | KIIKDKDFLDNEENEDILEDIVLTLTLFEDREMIEERLKTY |
| | | AHLFDDKVMKQLKRRRYTGWGRLSRKLINGIRDKQSGK |
| | | TILDFLKSDGFANRNFMQLIHDDSLTFKEDIQKAQVSGQG |
| | | DSLHEHIANLAGSPAIKKGILQTVKVVDELVKVMGRHKP |
| | | ENIVIEMARENQTTQKGQKNSRERMKRIEEGIKELGSQIL |
| | | KEHPVENTQLQNEKLYLYYLQNGRDMYVDQELDINRLS |
| | | DYDVDAIVPQSFLKDDSIDNKVLTRSDKNRGKSDNVPSE |
| | | EVVKKMKNYWRQLLNAKLITQRKFDNLTKAERGGLSEL |
| | | DKAGFIKRQLVETRQITKHVAQILDSRMNTKYDENDKLIR |
| | | EVKVITLKSKLVSDFRKDFQFYKVREINNYHHAHDAYLN |
| | | AVVGTALIKKYPKLESEFVYGDYKVYDVRKMIAKSEQEI |
| | | GKATAKYFFYSNIMNFFKTEITLANGEIRKRPLIETNGETG |
| | | EIVWDKGRDFATVRKVLSMPQVNIVKKTEVQTGGFSKES |
| | | ILPKRNSDKLIARKKDWDPKKYGGFDSPTVAYSVLVVAK |
| | | VEKGKSKKLKSVKELLGITIMERSSFEKNPIDFLEAKGYK |
| | | EVKKDLIIKLPKYSLFELENGRKRMLASAGELQKGNELAL |
| | | PSKYVNFLYLASHYEKLKGSPEDNEQKQLFVEQHKHYLD |
| | | EIIEQISEFSKRVILADANLDKVLSAYNKHRDKPIREQAEN |
| | | IIHLFTLTNLGAPAAFKYFDTTIDRKRYTSTKEVLDATLIH |
| | | QSITGLYETRIDLSQLGGD |
| 2340 | LINKER | SGGSSGGSSGSETPGTSESATPESSGGSSGGSS |
| | BETWEEN | |
| | CAS9 DOMAIN | |
| | AND RT | |
| | DOMAIN (33 | |
| | AMINO | |
| | ACIDS) | |
| 2283 | MMLV_RT | TLNIEDEYRLHETSKEPDVSLGSTWLSDFPQAWAETGGM |
| | D200N | GLAVRQAPLIIPLKATSTPVSIKQYPMSQEARLGIKPHIQR |
| | T330P | LLDQGILVPCQSPWNTPLLPVKKPGTNDYRPVQDLREVN |
| | L603W | KRVEDIHPTVPNPYNLLSGLPPSHQWYTVLDLKDAFFCLR |
| | T306K | LHPTSQPLFAFEWRDPEMGISGQLTWTRLPQGFKNSPTLF |
| | W313F | NEALHRDLADFRIQHPDLILLQYVDDLLLAATSELDCQQ |
| | | GTRALLQTLGNLGYRASAKKAQICQKQVKYLGYLLKEG |
| | | QRWLTEARKETVMGQPTPKTPRQLREFLGKAGFCRLFIP |
| | | GFAEMAAPLYPLTKPGTLFNWGPDQQKAYQEIKQALLT |
| | | APALGLPDLTKPFELFVDEKQGYAKGVLTQKLGPWRRPV |
| | | AYLSKKLDPVAAGWPPCLRMVAAIAVLTKDAGKLTMGQ |
| | | PLVILAPHAVEALVKQPPDRWLSNARMTHYQALLLDTDR |
| | | VQFGPVVALNPATLLPLPEEGLQHNCLDILAEAHGTRPDL |
| | | TDQPLPDADHTWYTDGSSLLQEGQRKAGAAVTTETEVI |
| | | WAKALPAGTSAQRAELIALTQALKMAEGKKLNVYTDSR |
| | | YAFATAHIHGEIYRRRGWLTSEGKEIKNKDEILALLKALF |
| | | LPKRLSIIHCPGHQKGHSAEARGNRMADQAARKAAITET |
| | | PDTSTLLIENSSP |
| 2326 | C-TERMINAL | SGGSKRTADGSEFEPKKKRKV |
| | NLS | |

TABLE 64
Amino acid sequence of exemplary primer editor fusion protein and individual
components

| SEQ ID | | |
|---|---|---|
| NO: | DESCRIPTION | SEQUENCE |
| 2344 | Exemplary prime | MKRTADGSEFESPKKKRKVDKKYSIGLDIGTNSVGWA |
| | editor [NLS]- | VITDEYKVPSKKFKVLGNTDRHSIKKNLIGALLFDSG |
| | [Cas9((R220K) | ETAEATRLKRTARRRYTRRKNRICYLQEIFSNEMAK |
| | (R393K) | VDDSFFHRLEESFLVEEDKKHERHPIFGNIVDEVAYH |
| | (H839A)]- | EKYPTIYHLRKKLVDSTDKADLRLIYLALAHMIKFR |
| | [linker]- | GHFLIEGDLNPDNSDVDKLFIQLVQTYNQLFEENPIN |
| | [MMLV_RT(D200N) | ASGVDAKAILSARLSKSRKLENLIAQLPGEKKNGLFG |
| | (T330P)(L603W) | NLIALSLGLTPNFKSNFDLAEDAKLQLSKDTYDDDLD |
| | (T306K)(W31 | NLLAQIGDQYADLFLAAKNLSDAILLSDILRVNTEITK |
| | 3F)]-[NLS] | APLSASMIKRYDEHHQDLTLLKALVRQQLPEKYKEI |
| | | FFDQSKNGYAGYIDGGASQEEFYKFIKPILEKMDGTE |
| | | ELLVKLKREDLLRKQRTFDNGSIPHQIHLGELHAILR |
| | | RQEDFYPFLKDNREKIEKILTFRIPYYVGPLARGNSR |
| | | FAWMTRKSEETITPWNFEEVVDKGASAQSFIERMTN |
| | | FDKNLPNEKVLPKHSLLYEYFTVYNELTKVKYVTEG |
| | | MRKPAFLSGEQKKAIVDLLFKTNRKVTVKQLKEDY |
| | | FKKIECFDSVEISGVEDRFNASLGTYHDLLKIIKDKDF |
| | | LDNEENEDILEDIVLTLTLFEDREMIEERLKTYAHLF |
| | | DDKVMKQLKRRRYTGWGRLSRKLINGIRDKQSGKT |
| | | ILDFLKSDGFANRNFMQLIHDDSLTFKEDIQKAQVSG |
| | | QGDSLHEHIANLAGSPAIKKGILQTVKVVDELVKVM |
| | | GRHKPENIVIEMARENQTTQKGQKNSRERMKRIEEG |
| | | IKELGSQILKEHPVENTQLQNEKLYLYYLQNGRDMY |
| | | VDQELDINRLSDYDVDAIVPQSFLKDDSIDNKVLTRS |
| | | DKNRGKSDNVPSEEVVKKMKNYWRQLLNAKLITQR |
| | | KFDNLTKAERGGLSELDKAGFIKRQLVETRQITKHV |
| | | AQILDSRMNTKYDENDKLIREVKVITLKSKLVSDFRK |
| | | DFQFYKVREINNYHHAHDAYLNAVVGTALIKKYPKL |
| | | ESEFVYGDYKVYDVRKMIAKSEQEIGKATAKYFFYS |
| | | NIMNFFKTEITLANGEIRKRPLIETNGETGEIVWDKG |
| | | RDFATVRKVLSMPQVNIVKKTEVQTGGFSKESILPK |
| | | RNSDKLIARKKDWDPKKYGGFDSPTVAYSVLVVAK |
| | | VEKGKSKKLKSVKELLGITIMERSSFEKNPIDFLEAK |
| | | GYKEVKKDLIIKLPKYSLFELENGRKRMLASAGELQ |
| | | KGNELALPSKYVNFLYLASHYEKLKGSPEDNEQKQL |
| | | FVEQHKHYLDEIIEQISEFSKRVILADANLDKVLSAYN |
| | | KHRDKPIREQAENIIHLFTLTNLGAPAAFKYFDTTID |
| | | RKRYTSTKEVLDATLIHQSITGLYETRIDLSQLGGDS |
| | | GGSSGGSKRTADGSEFESPKKKRKVSGGSSGGSTLNI |
| | | EDEYRLHETSKEPDVSLGSTWLSDFPQAWAETGGMGLAVR |
| | | QAPLIIPLKATSTPVSIKQYPMSQEARLGIKPHIQRLLDQGIL |
| | | VPCQSPWNTPLLPVKKPGTNDYRPVQDLREVNKRVEDIHP |
| | | TVPNPYNLLSGLPPSHQWYTVLDLKDAFFCLRLHPTSQPLF |
| | | AFEWRDPEMGISGQLTWTRLPQGFKNSPTLFNEALHRDLA |
| | | DFRIQHPDLILLQYVDDLLLAATSELDCQQGTRALLQTLGN |
| | | LGYRASAKKAQICQKQVKYLGYLLKEGQRWLTEARKETVM |
| | | GQPTPKTPRQLREFLGKAGFCRLFIPGFAEMAAPLYPLTK |
| | | PGTLFNWGPDQQKAYQEIKQALLTAPALGLPDLTKPFELF |
| | | VDEKQGYAKGVLTQKLGPWRRPVAYLSKKLDPVAAGWPP |
| | | CLRMVAAIAVLTKDAGKLTMGQPLVILAPHAVEALVKQPP |
| | | DRWLSNARMTHYQALLLDTDRVQFGPVVALNPATLLPLPE |
| | | EGLQHNCLDILAEAHGTRPDLTDQPLPDADHTWYTDGSSL |
| | | LQEGQRKAGAAVTTETEVIWAKALPAGTSAQRAELIALTQA |
| | | LKMAEGKKLNVYTDSRYAFATAHIHGEIYRRRGWLTSEGKE |
| | | IKNKDEILALLKALFLPKRLSIIHCPGHQKGHSAEARGNRM |
| | | ADQAARKAAITETPDTSTLLIENSSPSGGSKRTADGSEFESP |
| | | KKKRKVGSGPAAKRVKLD |
| | | KEY: |
| | | N-terminal bipartiteSV40NLS |
| | | CAS9(R221K N394K H840A) |
| | | SGGSx2-met-bpSV40NLS-SGGSx2 LINKER |
| | | M-MLV D200N T306K W313F T330P L603W REVERSE |
| | | TRANSCRIPTASE |
| | | C-terminal linker-NLS1 |
| | | C-terminal linker-NLS2 |
| 2311 | N-terminal | MKRTADGSEFESPKKKRKV |
| | bpSV40NLS | |
| 2289 | CAS9 (R221K | DKKYSIGLDIGTNSVGWAVITDEYKVPSKKFKVLGNTD |
| | N394K H840A) | RHSIKKNLIGALLFDSGETAEATRLKRTARRRYTRRKNR |
| | | ICYLQEIFSNEMAKVDDSFFHRLEESFLVEEDKKHERHPI |
| | | FGNIVDEVAYHEKYPTIYHLRKKLVDSTDKADLRLIYL |
| | | ALAHMIKFRGHFLIEGDLNPDNSDVDKLFIQLVQTYNQ |
| | | LFEENPINASGVDAKAILSARLSKSRKLENLIAQLPGEKK |
| | | NGLFGNLIALSLGLTPNFKSNFDLAEDAKLQLSKDTYD |
| | | DDLDNLLAQIGDQYADLFLAAKNLSDAILLSDILRVNTE |
| | | ITKAPLSASMIKRYDEHHQDLTLLKALVRQQLPEKYKEI |
| | | FFDQSKNGYAGYIDGGASQEEFYKFIKPILEKMDGTEEL |
| | | LVKLKREDLLRKQRTFDNGSIPHQIHLGELHAILRRQED |
| | | FYPFLKDNREKIEKILTFRIPYYVGPLARGNSRFAWMTR |
| | | KSEETITPWNFEEVVDKGASAQSFIERMTNFDKNLPNEK |
| | | VLPKHSLLYEYFTVYNELTKVKYVTEGMRKPAFLSGEQ |
| | | KKAIVDLLFKTNRKVTVKQLKEDYFKKIECFDSVEISGV |
| | | EDRFNASLGTYHDLLKIIKDKDFLDNEENEDILEDIVLTL |
| | | TLFEDREMIEERLKTYAHLFDDKVMKQLKRRRYTGWG |
| | | RLSRKLINGIRDKQSGKTILDFLKSDGFANRNFMQLIHD |
| | | DSLTFKEDIQKAQVSGQGDSLHEHIANLAGSPAIKKGIL |
| | | QTVKVVDELVKVMGRHKPENIVIEMARENQTTQKGQK |
| | | NSRERMKRIEEGIKELGSQILKEHPVENTQLQNEKLYLY |
| | | YLQNGRDMYVDQELDINRLSDYDVDAIVPQSFLKDDSI |
| | | DNKVLTRSDKNRGKSDNVPSEEVVKKMKNYWRQLLN |
| | | AKLITQRKFDNLTKAERGGLSELDKAGFIKRQLVETRQI |
| | | TKHVAQILDSRMNTKYDENDKLIREVKVITLKSKLVSD |
| | | FRKDFQFYKVREINNYHHAHDAYLNAVVGTALIKKYP |
| | | KLESEFVYGDYKVYDVRKMIAKSEQEIGKATAKYFFYS |
| | | NIMNFFKTEITLANGEIRKRPLIETNGETGEIVWDKGRDF |
| | | ATVRKVLSMPQVNIVKKTEVQTGGFSKESILPKRNSDK |
| | | LIARKKDWDPKKYGGFDSPTVAYSVLVVAKVEKGKSK |
| | | KLKSVKELLGITIMERSSFEKNPIDFLEAKGYKEVKKDLI |
| | | IKLPKYSLFELENGRKRMLASAGELQKGNELALPSKYV |
| | | NFLYLASHYEKLKGSPEDNEQKQLFVEQHKHYLDEIIEQ |
| | | ISEFSKRVILADANLDKVLSAYNKHRDKPIREQAENIIHL |
| | | FTLTNLGAPAAFKYFDTTIDRKRYTSTKEVLDATLIHQSI |
| | | TGLYETRIDLSQLGGD |
| 2387 | SGGSx2- | SGGSSGGSKRTADGSEFESPKKKRKVSGGSSGGS |
| | bpSV40NLS- | |
| | SGGSx2 linker | |
| 2283 | MMLV_RT | TLNIEDEYRLHETSKEPDVSLGSTWLSDFPQAWAETGG |
| | D200N T330P | MGLAVRQAPLIIPLKATSTPVSIKQYPMSQEARLGIKPHI |
| | L603W T306K | QRLLDQGILVPCQSPWNTPLLPVKKPGTNDYRPVQDLR |
| | W313F | EVNKRVEDIHPTVPNPYNLLSGLPPSHQWYTVLDLKDA |
| | | FFCLRLHPTSQPLFAFEWRDPEMGISGQLTWTRLPQGFK |
| | | NSPTLFNEALHRDLADFRIQHPDLILLQYVDDLLLAATS |
| | | ELDCQQGTRALLQTLGNLGYRASAKKAQICQKQVKYL |
| | | GYLLKEGQRWLTEARKETVMGQPTPKTPRQLREFLGK |
| | | AGFCRLFIPGFAEMAAPLYPLTKPGTLFNWGPDQQKAY |
| | | QEIKQALLTAPALGLPDLTKPFELFVDEKQGYAKGVLT |
| | | QKLGPWRRPVAYLSKKLDPVAAGWPPCLRMVAAIAVL |
| | | TKDAGKLTMGQPLVILAPHAVEALVKQPPDRWLSNAR |
| | | MTHYQALLLDTDRVQFGPVVALNPATLLPLPEEGLQHN |
| | | CLDILAEAHGTRPDLTDQPLPDADHTWYTDGSSLLQEG |
| | | QRKAGAAVTTETEVIWAKALPAGTSAQRAELIALTQAL |
| | | KMAEGKKLNVYTDSRYAFATAHIHGEIYRRRGWLTSE |
| | | GKEIKNKDEILALLKALFLPKRLSIIHCPGHQKGHSAEAR |
| | | GNRMADQAARKAAITETPDTSTLLIENSSP |
| 2341 | C-terminal linker- | SGGSKRTADGSEFESPKKKRKV |
| | NLS | |
| 2342 | C-terminal linker- | GSGPAAKRVKLD |
| | NLS2 | |

### PEgRNAs in Dual Prime Editing Compositions for FXN Gene Editing

[0386] The term “prime editing guide RNA”, or “PEgRNA”, refers to a guide polynucleotide that comprises one or more intended nucleotide edits for incorporation into the target double-stranded DNA. In some embodiments, the PEgRNA associates with and directs a prime editor to incorporate the one or more intended nucleotide edits into the target gene via prime editing.

[0387] In some embodiments, a PEgRNA comprises a spacer that is complementary or substantially complementary to a search target sequence on a target strand of the target gene. In some embodiments, the PEgRNA comprises a gRNA core that associates with a DNA binding domain, e.g., a CRISPR-Cas protein domain, of a prime editor. In some embodiments, the PEgRNA comprises an editing template. In some embodiments, the PEgRNA comprises a primer binding site (PBS). In some embodiments, a PEgRNA comprises an extension arm that comprises an editing template and a primer binding site (PBS).

[0388] Dual prime editing involves two different PEgRNAs each complexed with a prime editor. Provided herein are dual prime editing compositions and systems that comprises a first PEgRNA, a second PEgRNA, and a prime editor protein component, or one or more polynucleotides encoding the same that can be used for dual prime editing of the FXN gene to remove or replace expanded GAA repeats. Also provided herein are structure and exemplary sequences of the first (5′) PEgRNA and the second (3′) PEgRNA of a dual prime editing composition.

[0389] In some embodiments, the prime editor is the same for each of the PEgRNA-prime editor complexes. In some embodiments, the prime editor is different for each of the PEgRNA-prime editor complexes. In some embodiments, each of the two PEgRNAs comprises a region of complementarity to a distinct search target sequence of the double-stranded target DNA, wherein the two distinct search target sequences are on the two complementary strands of the double-stranded target DNA. In some embodiments, the two PEgRNAs each can direct a prime editor to initiate the prime editing process on the two complementary strands of the double-stranded target DNA. In some embodiments, each of the two PEgRNAs comprises a spacer complementary to a separate search target sequence. In some embodiments, each of the two PEgRNAs anneals with a separate search target sequence through its spacer.

[0390] In some embodiments, a first PEgRNA comprises a first spacer complementary to a first search target sequence on a first strand of a double-stranded target DNA, e.g., a double-stranded target gene. In the context of the first PEgRNA, the first strand of the double-stranded target DNA may be referred to as a first target strand, and the complementary strand referred to as the first PAM strand. In some embodiments, a first PEgRNA comprises a first gRNA core. In some embodiments, a first PEgRNA comprises a first editing template. In certain embodiments, a first PEgRNA comprises a first primer binding site (PBS) that is complementary to a free 3′ end formed at the first nick site.

[0391] In some embodiments, a second PEgRNA comprises a second spacer complementary to a second search target sequence on a second strand of a double-stranded target DNA, e.g., a target gene. In the context of the second PEgRNA, the second strand of the double-stranded target DNA may be referred to as a second target strand, and the complementary strand referred to as the second PAM strand. In some embodiments, a second PEgRNA comprises a second gRNA core. In some embodiments, a second PEgRNA comprises a second editing template. In some embodiments, a second PEgRNA comprises a second primer binding site (PBS) that is complementary to a free 3′ end formed at the second nick site.

[0392] In some embodiments, the editing template of the first PEgRNA comprises a region of complementarity to the editing template of the second PEgRNA. In some embodiments, the editing template of the first PEgRNA comprises a region of identity to the spacer of the second PEgRNA, e.g., a region of identity to at least 10, 11, 12, 13, 14, or 15 nucleotides at the 3′ end of the spacer of the second PEgRNA. In some embodiments, the editing template of the first PEgRNA comprises a region of complementarity to the editing template of the second PEgRNA, and also comprises a region of identity to the spacer of the second PEgRNA, e.g., a region of identity to at least 10, 11, 12, 13, 14, or 15 nucleotides at the 3′ end of the spacer of the second PEgRNA.

[0393] In certain embodiments, the first editing template of a first PEgRNA and the second editing template of a second PEgRNA comprise a region of complementarity to each other. In certain embodiments, the region of complementarity between the first editing template and the second editing template comprises a nucleotide sequence that is exogenous to the double-stranded target DNA or target gene. In certain embodiments, the exogenous sequence may be a marker, expression tag, barcode or regulatory sequence. In certain embodiments, the region of complementarity between the first editing template and the second editing template comprises a nucleotide sequence that is at least partially identical to a sequence in the double-stranded target DNA or target gene. In certain embodiments, the region of complementarity between the first editing template and the second editing template comprises a nucleotide sequence that is at least partially identical to a sequence in the IND.

[0394] In certain embodiments, the first editing template of a first PEgRNA and the second editing template of a second PEgRNA do not comprise a region of complementarity to each other. In certain embodiments, the first editing template of a first PEgRNA comprises region of identity to a sequence on the first target strand (or the first strand), and the second editing template comprises a region of identity to a sequence on the second target strand (or the second strand). In certain embodiments, the first editing template of a first PEgRNA comprises a region of identity to a sequence on the first target strand immediately adjacent to and outside the IND. In certain embodiments, the second editing template of a second PEgRNA comprises a region of identity to a sequence on the second target strand immediately adjacent to and outside the IND. In some embodiments, an editing template comprises one or more intended nucleotide edits to be incorporated in the double-stranded target DNA, e.g., the FXN gene, by prime editing. In some embodiments, incorporation of the newly synthesized single-stranded DNA encoded by the editing template results in incorporation of one or more intended nucleotide edit in the double-stranded target DNA, e.g., the FXN gene, compared to the endogenous sequence of the double-stranded target gene. For example, in some embodiments, the one or more intended nucleotide edits comprises deletion, insertion, and/or substitution of one or more nucleotides compared to the endogenous sequence of the double-stranded target gene, e.g., the FXN gene. In some embodiments, the one or more intended nucleotide edits comprises deletion of an array of tri-nucleotide repeats compared to the endogenous sequence of the double-stranded target gene, e.g., the FXN gene. In some embodiments, the one or more intended nucleotide edits comprises deletion of an array of GAA repeats compared to the endogenous sequence of the double-stranded target gene, e.g., the FXN gene. In some embodiments, the one or more intended nucleotide edits comprises deletion of an array of tri-nucleotide repeats, e.g., an array of GAA (or TTC) repeats, and insertion of one or more exogenous sequences compared to the endogenous sequence of the double-stranded target gene, e.g., the FXN gene. In some embodiments, the one or more intended nucleotide edits comprises deletion of a portion of an array of tri-nucleotide repeats, e.g., an array of GAA (or TTC) repeats, and optionally insertion of one or more exogenous sequences compared to the endogenous sequence of the double-stranded target gene, e.g., the FXN gene. In some embodiments, the one or more intended nucleotide edits comprises deletion of 1-3, 1-5, 1-10, 1-15, 1-20, 1-25, 1-30, 1-35, 1-40, 1-45, 1-50, 1-55, 1-60, 1-75 or more tri-nucleotide repeats compared to the endogenous sequence of the double-stranded target gene, e.g., the FXN gene. In some embodiments, the one or more intended nucleotide edits comprises deletion of 5-10, 5-15, 5-20, 5-25, 5-30, 5-35, 5-40, 5-50, 5-60, 5-70, 5-80, 5-90, 5-100, 20-30, 20-40, 20-50, 20-60, 20-70, 20-80, 20-90, 20-100, 35-40, 35-50, 35-60, 35-70, 35-80, 35-90, 35-100, 50-70, 50-80, 50-90, 50-100, 50-150, 50-200, 50-250, 50-300, 50-350, 50-400, 50-450, 50-500, 50-550, 50-600, 50-650, 50-700, 50-750, 50-800, 50-850, 50-900, 50-950, 50-1000, 50-1050, 50-1100, 50-1150, 50-1200, 50-1250, 50-1300, 50-1350, 50-1400, 50-1450, 50-1500, 100-150, 100-200, 100-250, 100-300, 100-350, 100-400, 100-450, 100-500, 100-550, 100-600, 100-650, 100-700, 100-750, 100-800, 100-850, 100-900, 100-950, 100-1000, 100-1050, 100-1100, 100-1150, 100-1200, 100-1250, 100-1300, 100-1350, 100-1400, 100-1450, 100-1500, 150-200, 150-250, 150-300, 150-350, 150-400, 150-450, 150-500, 150-550, 150-600, 150-650, 150-700, 150-750, 150-800, 150-850, 150-900, 150-950, 150-1000, 150-1050, 150-1100, 150-1150, 150-1200, 150-1250, 150-1300, 150-1350, 150-1400, 150-1450, 150-1500, 200-250, 200-300, 200-350, 200-400, 200-450, 200-500, 200-550, 200-600, 200-650, 200-700, 200-750, 200-800, 200-850, 200-900, 200-950, 200-1000, 200-1050, 200-1100, 200-1150, 200-1200, 200-1250, 200-1300, 200-1350, 200-1400, 200-1450, 200-1500, 250-300, 250-350, 250-400, 250-450, 250-500, 250-550, 250-600, 250-650, 250-700, 250-750, 250-800, 250-850, 250-900, 250-950, 250-1000, 250-1050, 250-1100, 250-1150, 250-1200, 250-1250, 250-1300, 250-1350, 250-1400, 250-1450, 250-1500, 300-350, 300-400, 300-450, 300-500, 300-550, 300-600, 300-650, 300-700, 300-750, 300-800, 300-850, 300-900, 300-950, 300-1000, 300-1050, 300-1100, 300-1150, 300-1200, 300-1250, 300-1300, 300-1350, 300-1400, 300-1450, 300-1500, 400-450, 400-500, 400-550, 400-600, 400-650, 400-700, 400-750, 400-800, 400-850, 400-900, 400-950, 400-1000, 400-1050, 400-1100, 400-1150, 400-1200, 400-1250, 400-1300, 400-1350, 400-1400, 400-1450, 400-1500, 500-550, 500-600, 500-650, 500-700, 500-750, 500-800, 500-850, 500-900, 500-950, 500-1000, 500-1050, 500-1100, 500-1150, 500-1200, 500-1250, 500-1300, 500-1350, 500-1400, 500-1450, 500-1500, 600-650, 600-700, 600-750, 600-800, 600-850, 600-900, 600-950, 600-1000, 600-1050, 600-1100, 600-1150, 600-1200, 600-1250, 600-1300, 600-1350, 600-1400, 600-1450, 600-1500, 700-750, 700-800, 700-850, 700-900, 700-950, 700-1000, 700-1050, 700-1100, 700-1150, 700-1200, 700-1250, 700-1300, 700-1350, 700-1400, 700-1450, 700-1500, 800-850, 800-900, 800-950, 800-1000, 800-1050, 800-1100, 800-1150, 800-1200, 800-1250, 800-1300, 800-1350, 800-1400, 800-1450, 800-1500, 900-950, 900-1000, 900-1050, 900-1100, 900-1150, 900-1200, 900-1250, 900-1300, 900-1350, 900-1400, 900-1450, 900-1500, 1000-1050, 1000-1100, 1000-1150, 1000-1200, 1000-1250, 1000-1300, 1000-1350, 1000-1400, 1000-1450, 1000-1500, 1100-1200, 1100-1300, 1100-1400, 1100-1500, 1200-1300, 1200-1400, 1200-1500, 1300-1400, 1300-1500, 1400-1500, 1500-1600, or 1500-1700 tri-nucleotide repeats compared to the endogenous sequence of the double-stranded target gene, e.g., the FAN gene.

[0395] In some embodiments, the editing template is a template for an RNA-dependent DNA polymerase domain or polypeptide of the prime editor, for example, a reverse transcriptase domain. The reverse transcriptase editing template may also be referred to herein as an RT template, or RTT.

[0396] In certain embodiments, the extension arm comprises a primer binding site sequence (PBS) that can initiate target-primed DNA synthesis. In some embodiments, the PBS is complementary or substantially complementary to a free 3′ end on the edit strand of the target gene at a nick site generated by the prime editor. In some embodiments, the first PEgRNA comprises a first PBS that comprises a region of complementarity to the second strand of the double-stranded target DNA or target gene. In some embodiments, the second PEgRNA comprises a second PBS that comprises a region of complementarity to the first strand of the double-stranded target DNA or target gene. In some embodiments, the first PEgRNA comprises a first PBS that comprises a region of complementarity to the first spacer of the first PEgRNA. In some embodiments, the first PEgRNA comprises a first PBS that is at least partially complementary to the first spacer of the first PEgRNA. In some embodiments, the second PEgRNA comprises a second PBS that comprises a region of complementarity to the second spacer of the second PEgRNA. In some embodiments, the second PEgRNA comprises a second PBS that is at least partially complementary to the second spacer of the second PEgRNA.

[0397] In some embodiments, a PEgRNA includes only RNA nucleotides and forms an RNA polynucleotide. In some embodiments, a PEgRNA is a chimeric polynucleotide that includes both RNA and DNA nucleotides. For example, a PEgRNA can include DNA in the spacer, the gRNA core, or the extension arm. In some embodiments, a PEgRNA comprises DNA in the spacer. In some embodiments, the entire spacer of a PEgRNA is a DNA sequence. In some embodiments, the PEgRNA comprises DNA in the gRNA core, for example, in a stem region of the gRNA core. In some embodiments, the PEgRNA comprises DNA in the extension arm, for example, in the editing template. An editing template that comprises a DNA sequence may serve as a DNA synthesis template for a DNA polymerase in a prime editor, for example, a DNA-dependent DNA polymerase. Accordingly, the PEgRNA may be a chimeric polynucleotide that comprises RNA in the spacer, gRNA core, and/or the PBS sequences and DNA in the editing template.

[0398] Components of a PEgRNA may be arranged in a modular fashion. In some embodiments, the spacer, the primer binding site sequence (PBS) and the editing template, e.g., a reverse transcriptase template (RTT), can be interchangeably located in the 5′ portion of the PEgRNA, the 3′ portion of the PEgRNA, or in the middle of the gRNA core. In some embodiments, a PEgRNA comprises a PBS and an editing template sequence in 5′ to 3′ order. In some embodiments, the gRNA core of a PEgRNA of this disclosure may be located in between a spacer and an extension arm (i.e., the PBS and editing template) of the PEgRNA. In some embodiments, the gRNA core of a PEgRNA may be located at the 3′ end of a spacer. In some embodiments, the gRNA core of a PEgRNA may be located at the 5′ end of a spacer. In some embodiments, the gRNA core of a PEgRNA may be located at the 3′ end of an extension arm. In some embodiments, the gRNA core of a PEgRNA may be located at the 5′ end of an extension arm. In some embodiments, a PEgRNA comprises, from 5′ to 3′: a spacer, a gRNA core, and an extension arm. In some embodiments, a PEgRNA comprises, from 5′ to 3′: a spacer, a gRNA core, an editing template, and a PBS. In some embodiments, a PEgRNA comprises, from 5′ to 3′: an extension arm, a spacer, and a gRNA core. In some embodiments, the PEgRNA comprises, from 5′ to 3′: an editing template, a PBS, a spacer, and a gRNA core. In some embodiments, a first PEgRNA comprises a structure: 5′-[first spacer]-[first gRNA core]-[first editing template]-[first primer binding site sequence]-3′. In some embodiments, a first PEgRNA comprises a structure: 5′-[first editing template]-[first primer binding site sequence]-[first spacer]-[first gRNA core]-3′. In some embodiments, a second PEgRNA comprises a structure: 5′-[second spacer]-[second gRNA core]-[second editing template]-[second primer binding site sequence]-3′. In some embodiments, a second PEgRNA comprises a structure: 5′-[second editing template]-[second primer binding site sequence]-[second spacer]-[second gRNA core]-3′.

[0399] In some embodiments, a PEgRNA comprises a single polynucleotide molecule that comprises the spacer, the gRNA core, and the editing template. In some embodiments, a PEgRNA comprises a single polynucleotide molecule that comprises the spacer, the gRNA core, and the extension arm (i.e., a PBS and editing template). In some embodiments, a PEgRNA comprises multiple polynucleotide molecules, for example, two polynucleotide molecules. In some embodiments, a PEgRNA comprise a first polynucleotide molecule that comprises the spacer and a portion of the gRNA core, and a second polynucleotide molecule that comprises the rest of the gRNA core and the extension arm. In some embodiments, the gRNA core portion in the first polynucleotide molecule and the gRNA core portion in the second polynucleotide molecule are at least partly complementary to each other. In some embodiments, the PEgRNA may comprise a first polynucleotide comprising the spacer and a first portion of a gRNA core referred to as a crRNA. In some embodiments, the PEgRNA comprise a second polynucleotide comprising a second portion of the gRNA core and the extension arm, wherein the second portion of the gRNA core may also be referred to as a trans-activating crRNA, or tracr RNA. In some embodiments, the crRNA portion and the tracr RNA portion of the gRNA core are at least partially complementary to each other. In some embodiments, the partially complementary portions of the crRNA and the tracr RNA form a lower stem, a bulge, and an upper stem, as exemplified in FIG. 3.

[0400] In some embodiments, a first spacer comprises a region that has substantial complementarity to a first search target sequence on a first target strand, or first strand, of a double-stranded target DNA, e.g., a FXN gene. In some embodiments, the first spacer of a PEgRNA is identical or substantially identical to a protospacer sequence on the second strand of the target gene (except that the protospacer sequence comprises thymine and the spacer may comprise uracil). In some embodiments, the first spacer is at least about 70%, 75%, 80%, 85%, 90%, 95%, or 100% complementary to a first search target sequence in the target gene. In some embodiments, the first spacer is substantially complementary to the first search target sequence. In some embodiments, a second spacer comprises a region that has substantial complementarity to a second search target sequence on the second target strand, or the second strand, of a double-stranded target DNA, e.g., a FXN gene. In some embodiments, the second spacer of a PEgRNA is identical or substantially identical to a protospacer on the first strand of the target gene (except that the protospacer comprises thymine and the spacer may comprise uracil). In some embodiments, the second spacer is at least about 70%, 75%, 80%, 85%, 90%, 95%, or 100% complementary to a second search target sequence in the target gene. In some embodiments, the second spacer is substantially complementary to the second search target sequence.

[0401] In some embodiments, the length of the spacer varies from at least 10 nucleotides to 100 nucleotides. For examples, a spacer may be at least 10 nucleotides, at least 11 nucleotides, at least 12 nucleotides, at least 13 nucleotides, at least 14 nucleotides, at least 15 nucleotides, at least 16 nucleotides, at least 17 nucleotides, at least 18 nucleotides, at least 19 nucleotides, at least 20 nucleotides, at least 21 nucleotides, at least 22 nucleotides, at least 23 nucleotides, at least 24 nucleotides, at least 25 nucleotides, at least 30 nucleotides, at least 40 nucleotides, at least 50 nucleotides, at least 60 nucleotides, at least 70 nucleotides, at least 80 nucleotides, at least 90 nucleotides, at least 100 nucleotides. In some embodiments, the spacer is 16 nucleotides, 17 nucleotides, 18 nucleotides, 19 nucleotides, 20 nucleotides, 21 nucleotides, or 22 nucleotides in length. In some embodiments, the spacer is from 15 nucleotides to 30 nucleotides in length, 15 to 25 nucleotides in length, 17 to 23 nucleotides in length, 18 to 22 nucleotides in length, 10 to 20 nucleotides in length, or 20 to 30 nucleotides in length. In some embodiments, the spacer is 19 nucleotides in length. In some embodiments, the spacer is 20 nucleotides in length. In some embodiments, the spacer is 17 to 18 nucleotides in length. In some embodiments, the spacer is 21 to 22 nucleotides in length.

[0402] An extension arm of a PEgRNA may comprise a primer binding site sequence (also referred to as a primer binding site, PBS, or PBS sequence) that hybridizes with a free 3′ end of a single-stranded DNA in the target gene (e.g., the FXN gene) generated by nicking with a prime editor. The length of the PBS sequence may vary depending on, e.g., the prime editor components, the search target sequence and other components of the PEgRNA. In some embodiments, the length of the primer binding site (PBS) varies from at least 2 nucleotides to 50 nucleotides. For examples, a primer binding site (PBS) may be at least 2 nucleotides, at least 3 nucleotides, at least 4 nucleotides, at least 5 nucleotides, at least 6 nucleotides, at least 7 nucleotides, at least 8 nucleotides, at least 9 nucleotides, at least 10 nucleotides, at least 11 nucleotides, at least 12 nucleotides, at least 13 nucleotides, at least 14 nucleotides, at least 15 nucleotides, at least 16 nucleotides, at least 17 nucleotides, at least 18 nucleotides, at least 19 nucleotides, or at least 20 nucleotides in length. In some embodiments, the PBS is at least 4 nucleotides in length. In some embodiments, the PBS is at least 6 nucleotides in length. In some embodiments, the PBS is about 5 to 19 nucleotides in length. In some embodiments, the PBS is about 8 to 17 nucleotides in length. In some embodiments, the PBS is about 8 to 16 nucleotides in length. In some embodiments, the PBS is about 9 to 12 nucleotides in length. In some embodiments, the PBS is about 10 to 12 nucleotides in length. In some embodiments, the PBS is 10 nucleotides in length. In some embodiments, the PBS is 10 nucleotides in length. In some embodiments, the PBS is about 4 to 12 nucleotides, about 6 to 12 nucleotides, about 8 to 12 nucleotides, about 10 to 12 nucleotides, 4 to 14 nucleotides, about 6 to 14 nucleotides, about 8 to 14 nucleotides, about 10 to 14 nucleotides, about 12 to 14 nucleotides, 4 to 16 nucleotides, about 6 to 16 nucleotides, about 8 to 16 nucleotides, about 10 to 16 nucleotides, about 6 to 18 nucleotides, about 6 to 20 nucleotides, about 8 to 20 nucleotides, about 10 to 20 nucleotides, about 12 to 20 nucleotides, about 14 to 20 nucleotides, about 16 to 20 nucleotides, or about 18 to 20 nucleotides in length. In some embodiments, the PBS is about 7 to 15 nucleotides in length. In some embodiments, the PBS is 6, 7, 8, 9, 10, 11, 12, 13, 14, 15, 16, 17, 18, 19, or 20 nucleotides in length. In some embodiments, the PBS is 8, 9, 10, 11, 12, 13, or 14 nucleotides in length. In some embodiments, the PBS is 3 to 19 nucleotides in length. In some embodiments, the PBS is 3 to 17 nucleotides in length. In some embodiments, the PBS is about 8 to 17 nucleotides in length. In some embodiments, the PBS is 8 to 9, 8 to 10, 8 to 11, or 8 to 12 nucleotides in length.

[0403] The PBS of a first PEgRNA may be complementary or substantially complementary to a DNA sequence in the second strand of the target gene. The PBS of a second PEgRNA may be complementary or substantially complementary to a DNA sequence in the first strand of the target gene. By annealing with the edit strand at a free hydroxy group, e.g., a free 3′ end generated by prime editor nicking, a PBS may initiate synthesis of a new single-stranded DNA encoded by the editing template at the nick site. In some embodiments, a PBS is at least about 70%, 75%, 80%, 85%, 90%, 95%, or 100% complementary to a region of the edit strand of the target gene (e.g., the FXN gene). In some embodiments, a PBS is perfectly complementary, or 100% complementary, to a region of the edit strand of the target gene (e.g., the FXN gene). An extension arm of a PEgRNA may comprise an editing template that serves as a DNA synthesis template for the DNA polymerase in a prime editor during prime editing.

[0404] The length of an editing template may vary depending on, e.g., the prime editor components, the search target sequence and other components of the PEgRNA. In some embodiments, the editing template serves as a DNA synthesis template for a reverse transcriptase, and the editing template is referred to as a reverse transcription editing template or simply reverse transcriptase template (RTT).

[0405] In some embodiments, the editing template (e.g., RTT) is 2, 3, 4, 5, 6, 7, 8, 9, 10, 11, 12, 13, 14, 15, 16, 17, 18, 19, 20, 21, 22, 23, 24, or 25 nucleotides in length. In some embodiments, the editing template is 12, 13, 14, 15, 16, 17, 18, 19, 20, 21, 22, 23, 24, or 25 nucleotides in length. In some embodiments, the editing template is 16, 17, 18, 19, 20, 21, 22, 23, 24, 25, 26, 27, 28, 29, 30, 31, 32, 33, 34, 35, 36, 37, 38, 39, or 40 nucleotides in length. In some embodiments, the editing template comprises 2, 3, 4, 5, 6, 7, 8, 9, 10, 11, 12, 13, 14, 15, 16, 17, 18, 19, 20, 21, 22, 23, 24, 25, 30, 35, 40, 45, 50 or more nucleotides. In some embodiments, the editing template comprises about 5 to 10, 5 to 15, 5 to 20, 5 to 25, 5 to 30, 5 to 35, 5 to 40, 5 to 45, 5 to 50, 5 to 55, 5 to 60, 5 to 65, 5 to 70, 5 to 75, 5 to 80, 5 to 85, 5 to 90, 5 to 95, 5 to 100, 5 to 110, 5 to 120, 5 to 130, 5 to 140, 5 to 150, 15 to 20, 15 to 25, 15 to 30, 15 to 35, 15 to 40, 15 to 45, 15 to 50, 15 to 55, 15 to 60, 15 to 65, 15 to 70, 15 to 75, 15 to 80, 15 to 85, 15 to 90, 15 to 95, 15 to 100, 15 to 110, 15 to 120, 15 to 130, 15 to 140, 15 to 150, 25 to 30, 25 to 35, 25 to 40, 25 to 45, 25 to 50, 25 to 55, 25 to 60, 25 to 65, 25 to 70, 25 to 75, 25 to 80, 25 to 85, 25 to 90, 25 to 95, 25 to 100, 25 to 110, 25 to 120, 25 to 130, 25 to 140, 25 to 150, 35 to 40, 35 to 45, 35 to 50, 35 to 55, 35 to 60, 35 to 65, 35 to 70, 35 to 75, 35 to 80, 35 to 85, 35 to 90, 35 to 95, 35 to 100, 35 to 110, 35 to 120, 35 to 130, 35 to 140, 35 to 150, 45 to 50, 45 to 55, 45 to 60, 45 to 65, 45 to 70, 45 to 75, 45 to 80, 45 to 85, 45 to 90, 45 to 95, 45 to 100, 45 to 110, 45 to 120, 45 to 130, 45 to 140, o45 to 150, 55 to 60, 55 to 65, 55 to 70, 55 to 75, 55 to 80, 55 to 85, 55 to 90, 55 to 95, 55 to 100, 55 to 110, 55 to 120, 55 to 130, 55 to 140, 55 to 150, 65 to 70, 65 to 75, 65 to 80, 65 to 85, 65 to 90, 65 to 95, 65 to 100, 65 to 110, 65 to 120, 65 to 130, 65 to 140, 65 to 150, 75 to 80, 75 to 85, 75 to 90, 75 to 95, 75 to 100, 75 to 110, 75 to 120, 75 to 130, 75 to 140, 75 to 150, 85 to 90, 85 to 95, 85 to 100, 85 to 110, 85 to 120, 85 to 130, 85 to 140, 85 to 150, 95 to 100, 95 to 110, 95 to 120, 95 to 130, 95 to 140, 95 to 150, 105 to 110, 105 to 120, 105 to 130, 105 to 140,105 to 150,115 to 120,115 to 130,115 to 140,115 to 150,125 to 130,125 to 140, 125 to 150, 135 to 140, 135 to 150, or 145 to 150 nucleotides in length.

[0406] In some embodiments, the editing template is 10, 11, 12, 13, 14, 15, 16, 17, 18, 19, 20, 21, 22, 23, 24 or 25 nucleotides in length. In some embodiments, the editing template is 30, 35, 40, 50, 60, 70, 80, 90, or 100 nucleotides in length. In some embodiments, the editing template is no greater than 20, 25, 30, 35, 40, 50, 60, 70, 80, 90, or 100 nucleotides in length. In some embodiments, the editing template comprises a sufficient number of nucleotides to form a sufficiently stable duplex with a sequence on the double-stranded target DNA. In some embodiments, the editing template comprises at least 10 polynucleotides. In some embodiments, the editing template comprises at least 15 polynucleotides. In some embodiments, the editing template comprises at least 20 polynucleotides.

[0407] In some embodiments, an editing template comprises 100, 90, 80, 70, 60, 50, 40, 30, 20, or 10 bases of endogenous sequence upstream and downstream of the trinucleotide repeat region, respectively. In some embodiments, a first editing template comprises a sequence corresponding to an endogenous sequence upstream of the TTC repeats. In some embodiments, a first editing template comprises a sequence corresponding to an endogenous sequence downstream of the TTC repeats. In some embodiments, a second editing template comprises a sequence corresponding to an endogenous upstream of the GAA repeats. In some embodiments, a second editing template comprises a sequence corresponding to an endogenous upstream of the GAA repeats. Use of a first PEgRNA comprising an endogenous sequence, in combination with a second PEgRNA comprising an endogenous sequence can result in an edit in which the number of genomic repeats is reduced to the number of repeats in the editing template pair. Editing templates containing any suitable number of GAA repeats (e.g., 0, 5, 10, 15, 20, 25, 30, or 35) and any suitable length of upstream/downstream endogenous sequence (e.g., 10 to 100) may be used in this fashion. When used with suitable corresponding spacers (i.e., designed for the appropriate strand) that result in nicks at the correct position, these template pairs may result in “seamless” edits, i.e., edits that reduce the number of repeats without altering the surrounding endogenous DNA. Other spacers may result in some alteration to surrounding endogenous sequence, but such alterations would not be expected to alter gene expression, because the repeat and the surrounding endogenous sequence is located in an intron. Sequences should be selected such that they do not introduce or disturb splice sites. In some embodiments, a dual prime editing composition comprises a first PEgRNA and a second PEgRNA, wherein the editing template of the first PEgRNA (i.e. the first editing template) and the editing template of the second PEgRNA (i.e. the second editing template) comprise a region of complementarity to each other. In some embodiments, the first editing template comprises, at its 5′ end, a region of complementarity to the second editing template, and the second editing template comprises at its 5′ end a region of complementarity to the first editing template. The first editing template and the second editing template may comprise sequences unrelated to the endogenous sequence. This may be done, for example, to insert a readily-identifiable sequence to permit rapid determination of successful editing, or to improve editing efficiency by controlling insert length or GC content. The region of complementarity between the first editing template and the second editing template (OD) may be throughout the entire length of the first or second editing template, or maybe of any length suitable for integration of the replacement duplex (RD). For example, the length of the complementarity region between the first and the second editing template may be at least 10, at least 15, at least 20, at least 25, or at least 30 base pairs (bp) in length. In some embodiments, the length of the complementarity region between the first and the second editing template may be 10, 11, 12, 13, 14, 15, 16, 17, 18, 19, 20, 21, 22, 23, 24, 25, 26, 27, 28, 29, 30, or up to the length of the first or the second editing template. In some embodiments, the RD is 10 to 15, 15 to 20, 20 to 25, 25 to 30, 30 to 35, or 35 to 40, 40 to 45, 45 to 50, 50 to 55, 55 to 60, 60 to 65, 65 to 70, 70 to 75, 75 to 80, 80 to 85, or 85 to 90 bp in length. In some embodiments, the RD is 15 bp in length. In some embodiments, the RD is 18 bp in length. In some embodiments, the RD is 20 bp in length. In some embodiments, the RD is 22 bp in length. In some embodiments, the RD is 23 bp in length. In some embodiments, the RD is 24 bp in length. In some embodiments, the RD is 30 bp in length. In some embodiments, the RD is 38 bp in length. In some embodiments, the RD is 53 bp in length. In some embodiments, the RD is 68 bp in length. In some embodiments, the RD is 83 bp in length.

[0408] The region of complementarity between the first editing template and the second editing template (the OD) and the replacement duplex (RD) may have varying GC content. For example, the OD or the RD may have a GC content of 20% to 25%, 25% to 30%, 30% to 35%, 35% to 40%, 40% to 45%, 45% to 50%, 50% to 55%, 55% to 60%, 60% to 65%, 65% to 70%, 70% to 75%, 75% to 80%, or 80% to 85%. In some embodiments, the OD or the RD has a GC content of 28%. In some embodiments, the OD or the RD has a GC content of 30%. In some embodiments, the OD has a GC content of 39%. In some embodiments, the OD has a GC content of 40%. In some embodiments, the OD has a GC content of 41%. In some embodiments, the OD has a GC content of 50%. In some embodiments, the OD has a GC content of 53%. In some embodiments, the OD has a GC content of 60%. In some embodiments, the OD has a GC content of 61%. In some embodiments, the OD has a GC content of 63%. In some embodiments, the OD has a GC content of 65%. In some embodiments, the OD has a GC content of 70%. In some embodiments, the OD has a GC content of 78%. In some embodiments, the OD has a GC content of 80%. In some embodiments, the OD has a GC content of 85%. In some embodiments, the OD is about 18 bp in length and has a GC content of about 78%. In some embodiments, the OD is about 20 bp in length and has a GC content of about 70%. In some embodiments, the OD is about 23 bp in length and has a GC content of about 65%. In some embodiments, the OD is about 30 bp in length and has a GC content of about 60%. In some embodiments, the OD is about 20 bp in length and has a GC content of about 40%. In some embodiments, the OD is about 38 bp in length and has a GC content of about 63%. In some embodiments, the OD has a GC content of at least about 60%. In some embodiments, the first or second editing template has a GC content of about 27%. In some embodiments, the first or second editing template has a GC content of about 30%. In some embodiments, the first or second editing template has a GC content of about 39%. In some embodiments, the first or second editing template has a GC content of about 40%. In some embodiments, the first or second editing template has a GC content of about 410%. In some embodiments, the first or second editing template has a GC content of about 42%. In some embodiments, the first or second editing template has a GC content of about 50%. In some embodiments, the first or second editing template has a GC content of about 53%. In some embodiments, the first or second editing template has a GC content of about 60%. In some embodiments, the first or second editing template has a GC content of about 61%. In some embodiments, the first or second editing template has a GC content of about 63%. In some embodiments, the first or second editing template has a GC content of about 65%. In some embodiments, the first or second editing template has a GC content of about 67%. In some embodiments, the first or second editing template has a GC content of about 70%. In some embodiments, the first or second editing template has a GC content of about 71%. In some embodiments, the first or second editing template has a GC content of about 78%. In some embodiments, the first or second editing template has a GC content of about 79%. In some embodiments, the first or second editing template has a GC content of about 80%. In some embodiments, the first or second editing template has a GC content of about 85%.

[0409] An intended nucleotide edit in an editing template of a PEgRNA may comprise various types of alterations as compared to the target gene sequence. In some embodiments, the nucleotide edit is a single nucleotide substitution as compared to the target gene sequence. In some embodiments, the nucleotide edit is a deletion as compared to the target gene sequence. In some embodiments, the nucleotide edit is an insertion as compared to the target gene sequence. In some embodiments, the editing template comprises one to ten intended nucleotide edits as compared to the target gene sequence. In some embodiments, the editing template comprises one or more intended nucleotide edits as compared to the target gene sequence. In some embodiments, the editing template comprises two or more intended nucleotide edits as compared to the target gene sequence. In some embodiments, the editing template comprises three or more intended nucleotide edits as compared to the target gene sequence. In some embodiments, the editing template comprises four or more, five or more, or six or more intended nucleotide edits as compared to the target gene sequence. In some embodiments, the editing template comprises two single nucleotide substitutions, insertions, deletions, or any combination thereof, as compared to the target gene sequence. In some embodiments, the editing template comprises three single nucleotide substitutions, insertions, deletions, or any combination thereof, as compared to the target gene sequence. In some embodiments, the editing template comprises four, five, or six single nucleotide substitutions, insertions, deletions, or any combination thereof, as compared to the target gene sequence. In some embodiments, a nucleotide substitution comprises an adenine (A)-to-thymine (T) substitution. In some embodiments, a nucleotide substitution comprises an A-to-guanine (G) substitution. In some embodiments, a nucleotide substitution comprises an A-to-cytosine (C) substitution. In some embodiments, a nucleotide substitution comprises a T-A substitution. In some embodiments, a nucleotide substitution comprises a T-G substitution. In some embodiments, a nucleotide substitution comprises a T-C substitution. In some embodiments, a nucleotide substitution comprises a G-to-A substitution. In some embodiments, a nucleotide substitution comprises a G-to-T substitution. In some embodiments, a nucleotide substitution comprises a G-to-C substitution. In some embodiments, a nucleotide substitution comprises a C-to-A substitution. In some embodiments, a nucleotide substitution comprises a C-to-T substitution. In some embodiments, a nucleotide substitution comprises a C-to-G substitution.

[0410] In some embodiments, a nucleotide insertion is at least 5 nucleotides, at least 6 nucleotides, at least 7 nucleotides, at least 8 nucleotides, at least 9 nucleotides, at least 10 nucleotides, at least 11 nucleotides, at least 12 nucleotides, at least 13 nucleotides, at least 14 nucleotides, at least 15 nucleotides, at least 16 nucleotides, at least 17 nucleotides, at least 18 nucleotides, at least 19 nucleotides, or at least 20 nucleotides in length. In some embodiments, a nucleotide insertion is from 1 to 2 nucleotides, from 1 to 3 nucleotides, from 1 to 4 nucleotides, from 1 to 5 nucleotides, from 2 to 5 nucleotides, from 3 to 5 nucleotides, from 3 to 6 nucleotides, from 3 to 8 nucleotides, from 4 to 9 nucleotides, from 5 to 10 nucleotides, from 6 to 11 nucleotides, from 7 to 12 nucleotides, from 8 to 13 nucleotides, from 9 to 14 nucleotides, from 10 to 15 nucleotides, from 11 to 16 nucleotides, from 12 to 17 nucleotides, from 13 to 18 nucleotides, from 14 to 19 nucleotides, from 15 to 20 nucleotides in length. In some embodiments, a nucleotide insertion is a single nucleotide insertion. In some embodiments, a nucleotide insertion comprises insertion of two nucleotides.

[0411] The editing template of a PEgRNA may comprise one or more intended nucleotide edits, compared to the FXN gene to be edited. Position of the intended nucleotide edit(s) relevant to other components of the PEgRNA, or to particular nucleotides (e.g., mutations) in the FXN target gene may vary. In some embodiments, the nucleotide edit is in a region of the PEgRNA corresponding to or homologous to the protospacer sequence. In some embodiments, the nucleotide edit is in a region of the PEgRNA corresponding to a region of the FXN gene outside of the protospacer sequence.

[0412] In some embodiments, incorporation of the one or more intended nucleotide edits results in deletion of the IND from the double-stranded target DNA, e.g., the FXN gene. In some embodiments, the IND comprises a mutation compared to a wild-type gene sequence, e.g., a wild-type FXN gene. In some embodiments, the IND comprises a mutation in intron 1 of the FXN gene as compared to a wild-type FXN gene. In some embodiments, the mutation is expansion of the number of GAA repeats compared to a wild-type FXN gene. In some embodiments, the IND is located between positions corresponding to positions Chr9: 69,037,287-69,037,304 of chromosome 9 as set forth in human genome research consortium build 38 (GRCh38) (on Assembly GRCh38). In some embodiments, the IND is located between positions corresponding to positions 69,037,187 and 69,037,404 of human chromosome 9 as set forth in human genome research consortium human build 38 (GRCh38). In some embodiments, the IND is located between positions corresponding to positions 69,037,087 and 69,037,504 of human chromosome 9 as set forth in human genome research consortium human build 38 (GRCh38). In some embodiments, the IND is located between positions corresponding to positions 69,035,752 and 69,079,076 of human chromosome 9 as set forth in human genome research consortium human build 38 (GRCh38). In some embodiments, the IND is located between positions corresponding to positions Chr9: 69,036,287-69,038,304 of chromosome 9 as set forth in human genome research consortium build 38 (GRCh38) (on Assembly GRCh38). In some embodiments, the IND is located between positions corresponding to positions Chr9: 69,035,287-69,039,304 of chromosome 9 as set forth in human genome research consortium build 38 (GRCh38) (on Assembly GRCh38). In some embodiments, the IND is located between positions corresponding to positions Chr9: 69,034,287-69,040,304 of chromosome 9 as set forth in human genome research consortium build 38 (GRCh38) (on Assembly GRCh38). In some embodiments, the IND is located between positions corresponding to positions Chr9: 69,033,287-69,041,304 of chromosome 9 as set forth in human genome research consortium build 38 (GRCh38) (on Assembly GRCh38). In some embodiments, the IND is located between positions corresponding to positions Chr9: 69,032,287-69,042,304 of chromosome 9 as set forth in human genome research consortium build 38 (GRCh38) (on Assembly GRCh38). In some embodiments, the IND is located between positions corresponding to positions Chr9: 69,031,287-69,043,304 of chromosome 9 as set forth in human genome research consortium build 38 (GRCh38) (on Assembly GRCh38). In some embodiments, the IND is located between positions corresponding to positions Chr9: 69,030,287-69,044,304 of chromosome 9 as set forth in human genome research consortium build 38 (GRCh38) (on Assembly GRCh38). In some embodiments, the IND is located between positions corresponding to positions Chr9: 69,029,287-69,045,304 of chromosome 9 as set forth in human genome research consortium build 38 (GRCh38) (on Assembly GRCh38).

[0413] In some embodiments, the editing template comprises an adenine at the first nucleobase position (e.g., for a PEgRNA following 5′-spacer-gRNA core-RTT-PBS-3′ orientation, the 5′ most nucleobase is the “first base”). In some embodiments, the editing template comprises a guanine at the first nucleobase position (e.g., for a PEgRNA following 5′-spacer-gRNA core-RTT-PBS-3′ orientation, the 5′ most nucleobase is the “first base”). In some embodiments, the editing template comprises a uracil at the first nucleobase position (e.g., for a PEgRNA following 5′-spacer-gRNA core-RTT-PBS-3′ orientation, the 5′ most nucleobase is the “first base”). In some embodiments, the editing template comprises a cytosine at the first nucleobase position (e.g., for a PEgRNA following 5′-spacer-gRNA core-RTT-PBS-3′ orientation, the 5′ most nucleobase is the “first base”). In some embodiments, the editing template does not comprise a cytosine at the first nucleobase position (e.g., for a PEgRNA following 5′-spacer-gRNA core-RTT-PBS-3′ orientation, the 5′ most nucleobase is the “first base”).

[0414] A guide RNA core (also referred to herein as the gRNA core, gRNA scaffold, or gRNA backbone sequence) of a PEgRNA may contain a polynucleotide sequence that binds to a DNA binding domain (e.g., Cas9) of a prime editor. The gRNA core may interact with a prime editor as described herein, for example, by association with a DNA binding domain, such as a Cas9 nickase of the prime editor.

[0415] In some embodiments, the first PEgRNA and the second PEgRNA have the same gRNA cores. In some embodiments, the first PEgRNA and the second PEgRNA have different gRNA cores.

[0416] One of skill in the art will recognize that different prime editors having different DNA binding domains from different DNA binding proteins may require different gRNA core sequences specific to the DNA binding protein. In some embodiments, the gRNA core is capable of binding to a Cas9-based prime editor. In some embodiments, the gRNA core is capable of binding to a Cpf1-based prime editor. In some embodiments, the gRNA core is capable of binding to a Cas12b-based prime editor. In some embodiments, the gRNA core comprises regions and secondary structures involved in binding with specific CRISPR Cas proteins. For example, in a Cas9 based prime editing system, the gRNA core of a PEgRNA may comprise one or more regions of a base paired “lower stem” adjacent to the spacer and a base paired “upper stem” following the lower stem, where the lower stem and upper stem may be connected by a “bulge” comprising unpaired RNAs. The gRNA core may further comprise a “nexus” distal from the spacer, followed by a hairpin structure, e.g., at the 3′ end, as exemplified in FIG. 3. In some embodiments, the gRNA core comprises modified nucleotides as compared to a wild-type gRNA core in the lower stem, upper stem, and/or the hairpin. For example, nucleotides in the lower stem, upper stem, and/or the hairpin regions may be modified, deleted, or replaced. In some embodiments, RNA nucleotides in the lower stem, upper stem, and/or the hairpin regions may be replaced with one or more DNA sequences. In some embodiments, the gRNA core comprises unmodified or wild-type RNA sequences in the nexus and/or the bulge regions. In some embodiments, the gRNA core does not include long stretches of A-T pairs, for example, a GTTTT-AAAAC pairing element. In some embodiments, a PEgRNA comprises a gRNA core that comprises a modified direct repeat compared to the sequence of a naturally occurring CRISPR-Cas guide RNA scaffold, for example, a Cas9 gRNA scaffold. In some embodiments, the PEgRNA comprises a “flip and extension (F+E)” gRNA core, wherein one or more base pairs in a direct repeat is modified. In some embodiments, the PEgRNA comprises a first direct repeat (the first pairing element or the lower stem), wherein a uracil is changed to an adenine (such that in the stem region, a U-A base pair is changed to a A-U base pair). In some embodiments, the PEgRNA comprises a first direct repeat wherein the fourth U-A base pair in the stem is changed to a A-U base pair. In some embodiments, the PEgRNA comprises a first direct repeat wherein one or more U-A base pair is changed to a G-C or C-G base pair. For example, in some embodiments, the PEgRNA comprises a first direct repeat comprising a modification to a GUUUU-AAAAC pairing element, wherein one or more of the U-A base pairs is changed to a A-U base pair, a G-C base pair, or a C-G base pair. In some embodiments, the PEgRNA comprises an extended first direct repeat.

[0417] In some embodiments, the gRNA core is capable of binding to a SpCas9, and comprises the sequence GTTTTAGAGCTAGAAATAGCAAGTTAAAATAAGGCTAGTCCGTTATCAACTTGAAAA AGTGGCACCGAGTCGGTGC (SEQ ID NO: 2260), or

[0418] GTTTGAGAGCTAGAAATAGCAAGTTTAAATAAGGCTAGTCCGTTATCAACTT GAAAAAGTGGGACCGAGTCGGTCC (SEQ ID NO: 2273), or GTTTAAGAGCTATGCTGGAAACAGCATAGCAAGTTTAAATAAGGCTAGTCCGTTATC AACTTGAAAAAGTGGCACCGAGTCGGTGC (SEQ ID NO: 2274). In some embodiments, the gRNA core comprises the sequence GTTTTAGAGCTAGAAATAGCAAGTTAAAATAAGGCTAGTCCGTTATCAACTTGAAAA AGTGGCACCGAGTCGGTGC (SEQ ID NO: 2260). In some embodiments, the gRNA core is capable of binding to a SaCas9 and comprises the sequence comprises the sequence GTTTTAGTACTCTGGAAACAGAATCTACTAAAACAAGGCAAAATGCCGTGTTTATCT CGTCAACTTGTTGGCGAGA (SEQ ID NO: 2275). In some embodiments, the gRNA core is capable of binding to a SluCas9 and comprises the sequence—GTTTTAGTACTCTGGAAACAGAATCTACTGAAACAAGACAATATGTCGTGTTTATCC CATCAATTTATTGGTGGGA (SEQ ID NO: 2276). In some embodiments, the gRNA core comprises the sequence

(SEQ ID NO: 2259)
GTTTAAGAGCGGGGAAATCCGCAAGTTTAAATAAGGCTAGTCCGTTATC
AGCGTGAAAACGCGGCACCGAGTCGGTGC.

[0419] In some embodiments, a PEgRNA comprises a gRNA core comprising the sequence

(SEQ ID NO: 2277)
GTTTTAGAGCTATACGTAGCAAGTTAAAATAAGGCTAGTCCGTTATCAA
CTTTACGAAGTGGCACCGAGTCGGTGC
or
(SEQ ID NO: 2278)
GTTTTAGAGCTATACGTAGCAAGTTAAAATAAGGCTAGTCCGTTATCAA
CTTTACGAAGTGGGACCGAGTCGGTCC.

[0420] In some embodiments, a PEgRNA comprises a gRNA core comprising the sequence

(SEQ ID NO: 2279)
GTTTTAGAGCTAGCTCATGAAAATGAGCTAGCAAGTTAAAATAAGGCTA
GTCCGTTATCAACTTGAAAAAGTGGGACCGAGTCGGTCC.

[0421] In some embodiments, a PEgRNA comprises a gRNA core comprising the sequence

(SEQ ID NO: 2273)
GTTTGAGAGCTAGAAATAGCAAGTTTAAATAAGGCTAGTCCGTTATCAA
CTTGAAAAAGTGGGACCGAGTCGGTCC.

[0422] In some embodiments, a PEgRNA comprises a gRNA core comprising the sequence

(SEQ ID NO: 2280)
GTTTAAGAGCTAGAAATAGCAAGTTTAAATAAGGCTAGTCCGTTATCAA
CTTGAAAAAGTGGCACCGAGTCGGTGC.

[0423] In some embodiments, a PEgRNA comprise a gRNA core comprising the sequence

(SEQ ID NO: 2281)
GTTTTAGAGCTATGCTGGAAACAGCATAGCAAGTTAAAATAAGGCTAGT
CCGTTATCAACTTGAAAAAGTGGCACCGAGTCGGTGC.

[0424] In some embodiments, a PEgRNA comprise a gRNA core comprising the sequence

(SEQ ID NO: 2274)
GTTTAAGAGCTATGCTGGAAACAGCATAGCAAGTTTAAATAAGGCTAGTC
CGTTATCAACTTGAAAAAGTGGCACCGAGTCGGTGC.

[0425] In some embodiments, a PEgRNA comprise a gRNA core comprising the sequence of SEQ ID NO: 2259 or 2260.

[0426] Table 59 lists exemplary gRNA core sequences for use in PEgRNAs. Any gRNA core sequences known in the art are also contemplated in the prime editing compositions described herein. In some embodiments, one or more nucleotides in the gRNA core is DNA. Unless indicated otherwise, for gRNA core sequences, components, and PEgRNA sequences provided, “T” is used instead of “U” in the sequences for consistency with the ST.26 standard.

TABLE 59
Exemplary gRNA core sequences
gRNA core sequence

GTTTAAGAGCGGGGAAATCCGCAAGTTTAAATAAGGCTAGTCCGTTATCAGCGTGAAAAC
GCGGCACCGAGTCGGTGC (SEQ ID NO: 2259)
GTTTTAGAGCTAGAAATAGCAAGTTAAAATAAGGCTAGTCCGTTATCAACTTGAAAAAGTG
GCACCGAGTCGGTGC (SEQ ID NO: 2260)
GTATAAGAGCGGGGAAATCCGCATGTTTATATAAGGCTAGTCCGTTATCAGCGTGAAAGCG
CGGCACCGAATCGGTGT (SEQ ID NO: 2261)
GTATAAGAGCGGGGAAATCCGCATGTTTATATAAGGCTAGTCCGTTATCAGCGTGAAAGCG
CGGCACCGAGTCGGTGT (SEQ ID NO: 2262)
GTTTAAGAGCGGGGAAATCCGCAAGTTTAAATAAGGCTAGTCCGTTATCAGCGGGAAACC
GCGGCACCGAGTCGGTGT (SEQ ID NO: 2263)
GTTTAAAAGCGGGGAAATCCGCAAGTTTAAATAAGGCTAGTCCGTTATCAGCGGGAAACC
GCGGCACCAAGTTGGTGT (SEQ ID NO: 2264)
GTATAAGAGCGGGGAAATCCGCAAGTTTATATAAGGCTAGTCCGTTATCAGCGTGAAAGC
GCGGCACCGAGTCGGTGC (SEQ ID NO: 2265)
GTATAAGAGCGGGGAAATCCGCAAGTTTATATAAGGCTAGTCCGTTATCAGCGTGAAAGC
GCGGCACCGAATCGGTGT (SEQ ID NO: 2266)
GTATAAGAGCGGGGAAATCCGCAAGTTTATATAAGACTAGTTCGTTATCAGCGTGAAAACG
CGGCACCGAGTCGGTGC (SEQ ID NO: 2267)
GTATAAGAGCGGGGAAATCCGCATGTTTATATAAGACTAGTTCGTTCTCAGCGTGAAAACG
CGGCACCGAGTCGGTGC (SEQ ID NO: 2268)
GTATAAGAGCGGGGAAATCCGCAAGTTTATATAAGACTAGTTCGTTATCAGCGTGAAAACG
CGGCACCGAGTCGGTGC (SEQ ID NO: 2271)
GTATAAGAGCGGGGAAATCCGCATGTTTATATAAGACTAGTTCGTTACCAGCGTGAAAACG
CGGCACCGAGTCGGTGC (SEQ ID NO: 2269)
GTATAAGAGCGGGGAAATCCGCAAGTTTATATAAGACTAGTTCGTTATCAGCGTGAAAACG
CGGCACCGAGTCGGTGC (SEQ ID NO: 2272)
GTATAAGAGCGGGGAAATCCGCATGTTTATATAAGACTAGTTCGTTAGCAGCGTGAAAACG
CGGCACCGAGTCGGTGC (SEQ ID NO: 2270)
GTTTGAGAGCTAGAAATAGCAAGTTTAAATAAGGCTAGTCCGTTATCAACTTGAAAAAGTG
GGACCGAGTCGGTCC (SEQ ID NO: 2273)
GTTTAAGAGCTATGCTGGAAACAGCATAGCAAGTTTAAATAAGGCTAGTCCGTTATCAACT
TGAAAAAGTGGCACCGAGTCGGTGC (SEQ ID NO: 2274)
GTTTTAGTACTCTGGAAACAGAATCTACTAAAACAAGGCAAAATGCCGTGTTTATCTCGTCAAC
TTGTTGGCGAGA (SEQ ID NO: 2275)
GTTTTAGTACTCTGGAAACAGAATCTACTGAAACAAGACAATATGTCGTGTTTATCCCATCAAT
TTATTGGTGGGA (SEQ ID NO: 2276)
GTTTTAGAGCTATACGTAGCAAGTTAAAATAAGGCTAGTCCGTTATCAACTTTACG
AAGTGGCACCGAGTCGGTGC (SEQ ID NO: 2277)
GTTTTAGAGCTATACGTAGCAAGTTAAAATAAGGCTAGTCCGTTATCAACTTTACG
AAGTGGGACCGAGTCGGTCC (SEQ ID NO: 2278)
GTTTTAGAGCTAGCTCATGAAAATGAGCTAGCAAGTTAAAATAAGGCTAGTCCGTT
ATCAACTTGAAAAAGTGGGACCGAGTCGGTCC (SEQ ID NO: 2279)
GTTTAAGAGCTAGAAATAGCAAGTTTAAATAAGGCTAGTCCGTTATCAACTTGAAA
AAGTGGCACCGAGTCGGTGC (SEQ ID NO: 2280)
GTTTTAGAGCTATGCTGGAAACAGCATAGCAAGTTAAAATAAGGCTAGTCCGTTAT
CAACTTGAAAAAGTGGCACCGAGTCGGTGC (SEQ ID NO: 2281)

[0427] In some embodiments, a PEgRNA comprises an additional secondary structure at the 5′ end. In some embodiments, a PEgRNA comprises an additional secondary structure at the 3′ end. In some embodiments, the secondary structure comprises a pseudoknot. In some embodiments, the secondary structure comprises a pseudoknot derived from a virus. In some embodiments, the secondary structure comprises a pseudoknot of a Moloney murine leukemia virus (M-MLV) genome (a mpknot). In some embodiments, the secondary structure comprises a nucleotide sequence selected from the group consisting of GGGTCAGGAGCCCCCCCCCTGAACCCAGGATAACCCTCAAAGTCGGGGGGCAACCG TCAGGGTCAGGAGCCCCCCCCCTGAACCCAGGATAACCCTCAAAGTCGGGGGGCAA CCC (SEQ ID NO: 2345), GGGTCAGGAGCCCCCCCCCTGAACCCAGGAAAACCCTCAAAGTCGGGGGGCAACCC (SEQ ID NO: 2346), GGGTCAGGAGCCCCCCCCCTGCACCCAGGAAAACCCTCAAAGTCGGGGGGCAACCC (SEQ ID NO:2347), GGGTCAGGAGCCCCCCCCCTGCACCCAGGATAACCCTCAAAGTCGGGGGGCAACCC (SEQ ID NO: 2348), GTCAGGGTCAGGAGCCCCCCCCCTGAACCCAGGAAAACCCTCAAAGTCGGGGGGCA ACCC (SEQ ID NO: 2349), GTCAGGGTCAGGAGCCCCCCCCCTGCACCCAGGAAAACCCTCAAAGTCGGGGGGCA ACCC (SEQ ID NO: 2350), and GGGTCAGGAGCCCCCCCCCTGAACCCAGGATAACCCTCAAAGTCGGGGGGC (SEQ ID NO: 2351), or a nucleotide sequence having at least 80%, 85%, 90%, 95%, 96%, 97%, 98%, or 99% sequence identity therewith. In some embodiments, the secondary structure comprises a nucleotide sequence of GGGTCAGGAGCCCCCCCCCTGAACCCAGGATAACCCTCAAAGTCGGGGGGC (SEQ ID NO: 2351), or a nucleotide sequence having at least 80%, 85%, 90%, 95%, 96%, 97%, 98%, or 99% sequence identity therewith.

[0428] In some embodiments, the secondary structure comprises a quadruplex. In some embodiments, the secondary structure comprises a G-quadruplex. In some embodiments, the secondary structure comprises a nucleotide sequence selected from the group consisting of gq2 (TGGTGGTGGTGGT (SEQ ID NO: 2352)), stk40 (GGGACAGGGCAGGGACAGGG (SEQ ID NO: 2353)), apc2 (GGGTCCGGGTCTGGGTCTGGG (SEQ ID NO: 2354)), stard3 (GGGCAGGGTCTGGGCTGGG (SEQ ID NO: 2355)), Unsl (GGGCTGGGATGGGAAAGGG (SEQ ID NO: 2356)), ceacam4 (GGGCTCTGGGTGGGCCGGG (SEQ ID NO: 2357)), erc1 (GGGCTGGGCTGGGCAGGG (SEQ ID NO:2358)), pitpnm3 (GGGTGGGCTGGGAAGGG (SEQ ID NO: 2359)), rlf (GGGAGGGAGGGCTAGGG (SEQ ID NO: 2360)), ube3c (GGGCAGGGCTGGGAGGG (SEQ ID NO: 2361)), taf15 (GGGTGGGAGGGCTGGG (SEQ ID NO: 2362)), and xrn1 (GCGTAACCTCCATCCGAGTTGCAAGAGAGGGAAACGCAGTCTC (SEQ ID NO: 2363)), or a nucleotide sequence having at least 80%, 85%, 90%, 95%, 96%, 97%, 98%, or 99% sequence identity therewith.

[0429] In some embodiments, the secondary structure comprises a P4-P6 domain of a Group I intron. In some embodiments, the secondary structure comprises the nucleotide sequence of GGAATTGCGGGAAAGGGGTCAACAGCCGTTCAGTACCAAGTCTCAGGGGAAACTTT GAGATGGCCTTGCAAAGGGTATGGTAATAAGCTGACGGACATGGTCCTAACCACGC AGCCAAGTCCTAAGTCAACAGATCTTCTGTTGATATGGATGCAGTTCA (SEQ ID NO: 2364), or a nucleotide sequence having at least 80%, 85%, 90%, 95%, 96%, 97%, 98%, or 99% sequence identity therewith.

[0430] In some embodiments, the secondary structure comprises a riboswitch aptamer. In some embodiments, the secondary structure comprises a riboswitch aptamer derived from a prequeosine-1 riboswitch aptamer. In some embodiments, the secondary structure comprises a modified prequeosine-1 riboswitch aptamer. In some embodiments, the secondary structure comprises a nucleotide sequence selected from the group consisting of TTGACGCGGTTCTATCTAGTTACGCGTTAAACCAACTAGAAA (SEQ ID NO: 2365), TTGACGCGGTTCTATCTACTTACGCGTTAAACCAACTAGAAA (SEQ ID NO:2366), CGCGAGTCTAGGGGATAACGCGTTAAACTTCCTAGAAGGCGGTT (SEQ ID NO: 2367), CGCGGATCTAGATTGTAACGCGTTAAACCATCTAGAAGGCGGTT (SEQ ID NO: 2368), CGCGTCGCTACCGCCCGGCGCGTTAAACACACTAGAAGGCGGTT (SEQ ID NO: 2369), and CGCGGTTCTATCTAGTTACGCGTTAAACCAACTAGAA (SEQ ID NO: 2237), or a nucleotide sequence having at least 80%, 85%, 90%, 95%, 96%, 97%, 98%, or 99% sequence identity therewith. In some embodiments, the secondary structure comprises a nucleotide sequence selected from the group consisting of TTGACGCGGTTCTATCTAGTTACGCGTTAAACCAACTAGAAA (SEQ ID NO: 2365), CGCGAGTCTAGGGGATAACGCGTTAAACTTCCTAGAAGGCGGTT (SEQ ID NO: 2367), CGCGGATCTAGATTGTAACGCGTTAAACCATCTAGAAGGCGGTT (SEQ ID NO: 2368), CGCGTCGCTACCGCCCGGCGCGTTAAACACACTAGAAGGCGGTT (SEQ ID NO: 2369), and CGCGGTTCTATCTAGTTACGCGTTAAACCAACTAGAA (SEQ ID NO: 2237), or a nucleotide sequence having at least 80%, 85%, 90%, 95%, 96%, 97%, 98%, or 99% sequence identity therewith. In some embodiments, the secondary structure comprises a nucleotide sequence of and CGCGGTTCTATCTAGTTACGCGTTAAACCAACTAGAA (SEQ ID NO: 2237), or a nucleotide sequence having at least 80%, 85%, 90%, 95%, 96%, 97%, 98%, or 99% sequence identity therewith.

[0431] In some embodiments, the secondary structure is linked to one or more other component of a PEgRNA via a linker. For example, in some embodiments, the secondary structure is at the 3′ end of the PEgRNA and is linked to the 3′ end of a PBS via a linker. In some embodiments, the secondary structure is at the 5′ end of the PEgRNA and is linked to the 5′ end of a spacer via a linker. In some embodiments, the linker is a nucleotide linker that is 1, 2, 3, 4, 5, 6, 7, 8, 9, 10, 11, 12, 13, 14, 15, 16, 17, 18, 19, 20, 21, 22, 23, 24, 25, 26, 27, 28, 29, 30, 31, 32, 33, 34, 35, 36, 37, 38, 39, 40, 41, 42, 43, 44, 45, 46, 47, 48, 49, or 50 nucleotides in length. In some embodiments, the linker is 5 to 10 nucleotides in length. In some embodiments, the linker is 10 to 20 nucleotides in length. In some embodiments, the linker is 15 to 25 nucleotides in length. In some embodiments, the linker is 8 nucleotides in length.

[0432] In some embodiments, the linker is designed to minimize base pairing between the linker and another component of the PEgRNA. In some embodiments, the linker is designed to minimize base pairing between the linker and the spacer. In some embodiments, the linker is designed to minimize base pairing between the linker and the PBS. In some embodiments, the linker is designed to minimize base pairing between the linker and the editing template. In some embodiments, the linker is designed to minimize base pairing between the linker and the sequence of the RNA secondary structure. In some embodiments, the linker is optimized to minimize base pairing between the linker and another component of the PEgRNA, in order of the following priority: spacer, PBS, editing template and then scaffold. In some embodiments, base pairing probability is calculated using ViennaRNA 2.0 under standard parameters (37° C., 1 M NaCl, 0.05 M MgCl2).

[0433] In some embodiments, the PEgRNA comprises a RNA secondary structure and/or a linker disclosed in Nelson et al. Engineered pegRNAs improve prime editing efficiency. Nat Biotechnol. (2021), the entirety of which is incorporated herein by reference.

[0434] In some embodiments, a PEgRNA is transcribed from a nucleotide encoding the PEgRNA, for example, a DNA plasmid encoding the PEgRNA. In some embodiments, the PEgRNA comprises a self-cleaving element. In some embodiments, the self-cleaving element improves transcription and/or processing of the PEgRNA when transcribed from the polynucleotide encoding the PEgRNA. In some embodiments, the PEgRNA comprises a hairpin or a RNA quadruplex. In some embodiments, the PEgRNA comprises a self-cleaving ribozyme element, for example, a hammerhead, a pistol, a hatchet, a hairpin, a VS, a twister, or a twister sister ribozyme. In some embodiments, the PEgRNA comprises a HDV ribozyme. In some embodiments, the PEgRNA comprises a hairpin recognized by Csy4. In some embodiments, the PEgRNA comprises an ENE motif. In some embodiments, the PEgRNA comprises an element for nuclear expression (ENE) from MALAT1 Inc RNA. In some embodiments, the PEgRNA comprises an ENE element from Kaposi's sarcoma-associated herpesvirus (KSHV). In some embodiments, the PEgRNA comprises a 3′ box of a U1 snRNA. In some embodiments, the PEgRNA forms a circular RNA.

[0435] In some embodiments, the PEgRNA comprises a RNA secondary structure or a motif that improves binding to the DNA-RNA duple or enhances PEgRNA activity. In some embodiments, the PEgRNA comprises a sequence derived from a native nucleotide element involved in reverse transcription, e.g., initiation of retroviral transcription. In some embodiments, the PEgRNA comprises a sequence of, or derived from, a primer binding site of a substrate of a reverse transcriptase, a polypurine tract (PPT), or a kissing loop. In some embodiments, the PEgRNA comprises a dimerization motif, a kissing loop, or a GNRA tetraloop-tetraloop receptor pair that results in circularization of the PEgRNA. In some embodiments, the PEgRNA comprises a RNA secondary structure of a motif that results in physical separation of the spacer and the PBS of the PEgRNA, thereby preventing occlusion of the spacer and improving PEgRNA activity. In some embodiments, the PEgRNA comprises a secondary structure or motif, e.g., a 5′ or 3′ extension in the spacer region that form a toehold or hairpin, wherein the secondary structure or motif competes favorably against annealing between the spacer and the PBS of the PEgRNA, thereby preventing occlusion of the spacer and improving PEgRNA activity.

[0436] In some embodiments, a PEgRNA comprises the sequence GGCCGGCATGGTCCCAGCCTCCTCGCTGGCGCCGGCTGGGCAACATGCTTCGGCATGG CGAATGGGAC (SEQ ID NO: 2371) at the 3′ end. In some embodiments, a PEgRNA comprises the structure [spacer]-[gRNA core]-[editing template]-[PBS]-GGCCGGCATGGTCCCAGCCTCCTCGCTGGCGCCGGCTGGGCAACATGCTTCGGCATGG CGAATGGGAC (SEQ ID NO: 2371), or [spacer]-[gRNA core]-[editing template]-[PBS]-GGCCGGCATGGTCCCAGCCTCCTCGCTGGCGCCGGCTGGGCAACATGCTTCGGCATGG CGAATGGGAC-(T)n (SEQ ID NO: 2372), wherein n is an integer between 3 and 7. The structure derived from hepatitis D virus (HDV) is italicized.

[0437] In some embodiments, the PEgRNA comprises the sequence GGTGGGAGACGTCCCACC (SEQ ID NO: 2373) at the 5′ end and/or the sequence TGGGAGACGTCCCACC (SEQ ID NO: 2374) at the 3′ end. In some embodiments, the PEgRNA comprises the following structure (M-MLV kissing loop): GGTGGGAGACGTCCCACC (SEQ ID NO: 2373)-[spacer]-[gRNA core]-[editing template]-[PBS]-TGGGAGACGTCCCACC (SEQ ID NO: 2374), or GGTGGGAGACGTCCCACC (SEQ ID NO: 2373)-[spacer]-[gRNA core]-[editing template]-[PBS]-TGGGAGACGTCCCACC-(T)n (SEQ ID NO: 2375), wherein n is an integer between 3 and 7. The kissing loop structure is italicized.

[0438] In some embodiments, the PEgRNA comprises the sequence GAGCAGCATGGCGTCGCTGCTCAC (SEQ ID NO: 2376) at the 5′ end and/or the sequence CCATCAGTTGACACCCTGAGG (SEQ ID NO: 2377) at the 3′ end. In some embodiments, the PEgRNA comprises the following structure (VS ribozyme kissing loop): GAGCAGCATGGCGTCGCTGCTCAC (SEQ ID NO: 2376)-[spacer]-[gRNA core]-[editing template]-[PBS]-CCATCAGTTGACACCCTGAGG (SEQ ID NO: 2377), or GAGCAGCATGGCGTCGCTGCTCAC (SEQ ID NO: 2376)-[spacer]-[gRNA core]-[editing template]-[PBS]-CCATCAGTTGACACCCTGAGG-(T)n (SEQ ID NO: 2378), wherein n is an integer between 3 and 7.

[0439] In some embodiments, the PEgRNA comprises the sequence GCAGACCTAAGTGGTGACATATGGTCTG (SEQ ID NO: 2379) at the 5′ end and/or the sequence CATGCGATTAGAAATAATCGCATG (SEQ ID NO: 2380) at the 3′ end. In some embodiments, the PEgRNA comprises the following structure (tetraloop and receptor): GCAGACCTAAGTGGTGACATATGGTCTG (SEQ ID NO: 2379)-[spacer]-[gRNA core]-[editing template]-[PBS]-CATGCGATTAGAAATAATCGCATG (SEQ ID NO: 2380), or GCAGACCTAAGTGGTGACATATGGTCTG (SEQ ID NO: 2379)-[spacer]-[gRNA core]-[editing template]-[PBS]-CATGCGATTAGAAATAATCGCATG-(T)n (SEQ ID NO: 2381), wherein n is an integer between 3 and 7. The tetraloop/tetraloop receptor structure is italicized.

[0440] In some embodiments, the PEgRNA comprises the sequence GGCCGGCATGGTCCCAGCCTCCTCGCTGGCGCCGGCTGGGCAACATGCTTCGGCATG GCGAATGGGAC (SEQ ID NO: 2382) or TCTGCCATCAAAGCTGCGACCGTGCTCAGTCTGGTGGGAGACGTCCCACCGGCCGGC ATGGTCCCAGCCTCCTCGCTGGCGCCGGCTGGGCAACATGCTTCGGCATGGCGAATG GGAC (SEQ ID NO: 2383) at the 3′ end.

[0441] A dual prime editing composition can comprise two PEgRNAs, each comprising a spacer, a gRNA core, and an extension arm comprising an editing template and a primer binding site (PBS). An extension arm can also be referred to as an RTT. Exemplary PEgRNAs for editing the FAN gene, as well as corresponding components of PEgRNAs, are provided in Tables 1-57B. Tables 1-8 provide exemplary spacer sequences and PBS sequences of a 5′ PEgRNA, as well as exemplary 5′ PEgRNAs that contain a spacer and a PBS provided in the same table. Tables 9-55 provide exemplary spacer sequences and PBS sequences of a 3′ PEgRNA, as well as exemplary 3′ PEgRNAs that contain a spacer and a PBS provided in the same table. Each of Tables 1-55 contains three columns: from left to right, the first column provides the sequence number; the second column provides the sequence of the PEgRNA or component, labeled with a SEQ ID NO, as required by ST.26 standard. The third column contains a description of the sequence. Table 56 provides exemplary RTT sequences, where an RTT of a 5′ PEgRNA (referred to as a 5′ RTT) and an RTT of a 3′PEgRNA (referred to as a 3′ RTT) of a dual prime editing composition share a region of complementarity with each other. Table 56 contains seven columns. From left to right, the first column of Table 56 provides a RTT pairing number; the second column provides the sequence of one RTT sequence of a pair of PEgRNAs (annotated as “RTT1”), and the third column provides the sequence of the other RTT sequence of the pair of PEgRNAs (annotated as “RTT2”). Sequences in the second and the third columns are labeled with a SEQ ID NO as required by ST.26 standard. Each of the RTT1 and RTT2 pair in the same row of Table 56 comprise a region of complementarity to each other, and are annotated with the same RTT pairing number. The RTT1 sequence can be a 5′ RTT and the RTT2 sequence can be a 3′ RTT, and vice versa. The fourth and the fifth columns of Table 56 provide the length and the GC content of the region of complementarity between each pair of RTT1 and RTT2. The sixth and the seventh columns of Table 56 provide the length and the GC content of the insertion sequence into a target site as encoded by the RTT pair (i.e. the replacement duplex, or the RD). In some cases, RTT1 and RTT2 are perfectly complementary to each other throughout their entire lengths, and the lengths in columns 4 and 6 as well as the GC content in columns 5 and 7 are the same.

[0442] Tables 57A and 57B provide exemplary RTTs that comprises a region of identity to the spacer of the other PEgRNA in a PEgRNA pair. Exemplary 5′ RTTs are provided in Table 57A, and exemplary 3′ RTTs are provided in Table 57B. These RTTs each comprises a region of complementarity to the endogenous FXN sequence. Tables 57A and 57B each has five columns from left to right. The first column provides sequences of the RTTs, which are labeled with a SEQ ID NO as required by the ST.26 standard. The second column provides a spacer group number for each RTT, where a PEgRNA comprising the RTT can be used in a prime editing composition comprising another PEgRNA that comprises the group of spacers as annotated in the second column of Table 57A or 57B. For a 5′ RTT in Table 57A, the second column provides exemplary 3′ PEgRNA spacer groups that can be used in the same PEgRNA pair as a PEgRNA containing the 5′ RTT. For a 3′ RTT in Table 57B, the second column provides exemplary 5′ PEgRNA spacer groups that can be used in the same PEgRNA pair as a PEgRNA containing the 3′ RTT. The spacer group number is also the same as the table number that the group of spacers belong to. The third column of Tables 57A and B provides the SEQ ID NOs of exemplary 20 nucleotide spacers within the spacer groups as provided in the second column. The forth and fifth columns of Tables 57A and B provide the length and GC content of the region of complementarity of each RTT to the endogenous FXN sequence.

[0443] 5′ PEgRNAs and 3′ PEgRNAs exemplified in Tables 1-57B can be used in a dual prime editing composition with any prime editor containing a Cas9 protein capable of recognizing a NGG PAM sequence, wherein N is A, G, C, or T. A dual prime editing composition for editing of the GAA repeats in the FXN gene can comprise (A) a 5′ PEgRNA (can also be referred to as a first PEgRNA) and a (B) 3′ PEgRNA (can also be referred to as a second PEgRNA), wherein the first PEgRNA comprises (i) a first spacer that comprises at its 3′ end a 5′ spacer sequence provided in any one of Tables 1-8; (ii) a first gRNA core capable of binding to a Cas9 protein; and (iii) a first extension arm comprising a first editing template and a first primer binding site (PBS), wherein the first PBS comprises at its 5′ end any 5′ PBS sequence provided in the same table as the first spacer; wherein the second PEgRNA comprises (i) a second spacer that comprises at its 3′ end a 3′ spacer sequence provided in any one of Tables 9-55; (ii) a second gRNA core capable of binding to a Cas9 protein; and (iii) a second extension arm comprising a second editing template and a second PBS, wherein the second PBS comprises at its 5′ end any 3′ PBS sequence provided in the same table as the second spacer, and wherein (a) the first editing template comprises a region of complementarity to the second editing template; (b) the first editing template comprises nucleotides (p-12) to (p-3) of the second spacer, wherein p is the length of the second spacer, and the second editing template comprises nucleotides (q-12) to (q-3) of the first spacer, wherein q is the length of the first spacer, or (c) the first editing template comprises nucleotides (p-12) to (p-3) of the second spacer and a region of complementarity to the second editing template, and the second editing template comprises nucleotides (q-12) to (q-3) of the first spacer and a region of complementarity to the first editing template.

[0444] The 5′ PEgRNA spacers and the 3′ PEgRNA spacers exemplified in Tables 1-55 can be, for example, 17 to 22 nucleotides in length. Spacers in each Table may be referred to as a spacer group that can be used with the same Cas9 that recognizes the same PAM sequence, and all spacers in the same table or group can correspond to one specific nicking site. For example, spacers in Table 1 may be referred to as spacer group 1. In some embodiments, the 5′ PEgRNA spacer and/or the 3′ PEgRNA spacer are 20 nucleotides in length. The PBS of the 5′ PEgRNA and the 3′ PEgRNA can be, for example, 5 to 19 nucleotides in length. In some embodiments, the PBS is 8 to 17 nucleotides in length. In some embodiments, the PBS is 8 to 16 nucleotides in length. In some embodiments, the PBS is 10 to 12 nucleotides in length. In some embodiments, the PBS is 10 or 12 nucleotides in length.

[0445] In some embodiments, a dual prime editing composition can comprise a 5′ PEgRNA and a 3′ PEgRNA, wherein the 5′ PEgRNA comprises a spacer selected from any one of Tables 1-8 and a PBS selected from the same table as the 5′ spacer, the 3′ PEgRNA comprises a spacer selected from Tables 9-55 and a PBS selected from the same table as a 3′ spacer, and wherein the RTT of the 5′ PEgRNA (the 5′ RTT) comprise a region of complementarity to the RTT of the 3′ PEgRNA (the 3′ RTT). The 5′ PEgRNA is capable of complexing with a prime editor comprising a Cas9 nickase (e.g. a Cas9 having an inactivated HNH nuclease domain) to generate a first nick, and the 3′ PEgRNA is capable of complexing with a prime editor comprising a Cas9 nickase (e.g. a Cas9 having an inactivated HNH nuclease domain) to generate a second nick on the FXN gene. Accordingly, contacting the target FXN gene with the dual prime editing system can result in deletion of the sequence between the first nick and the second nick (the deleted region referred to as the IND) that includes the GAA repeats and insertion of the replacement duplex (RD) encoded by the 5′ RTT and the 3′ RTT. The 5′ RTT and the 3′ RTT can be completely complementary to each other throughout their entire length, or they can be partially complementary, e.g., the region of complementarity can be at the 3′ ends of the 3′ RTT and the 5′ RTT. The region of complementarity (also referred to herein as the overlapping duplex or the OD) between the 5′ RTT and the 3′ RTT can have various lengths and GC content. In some embodiments, the OD is about 15 to 38 base pairs in length. In some embodiments, the OD is 18 to 38 base pairs in length. In some embodiments, the OD has a GC content of at least about 27%. In some embodiments, the OD is 18 to 38 base pairs in length. In some embodiments, the OD has a GC content of about 30% to about 85%. In some embodiments, the OD has a GC content of about 40% to about 70%. In some embodiments, the OD has a GC content of about 63% to about 70%. The RD can also have various lengths and GC content. In some embodiments, when the 5′ RTT and the 3′ RTT are completely complementary to each other throughout their entire length, the OD and the RD have the same length and GC content. In some embodiments, the OD and the RD have different lengths and GC content. In some embodiments, the RD has a length of about 15 to about 93 base pairs. In some embodiments, the ratio of OD/RD is at least about 18%. In some embodiments, the ratio of OD/RD is at least about 20%. In some embodiments, the ratio of OD/RD is about 27%, about 29%, about 31%, about 36%, about 40%, about 41%, about 57%, or about 62%. In some embodiments, the OD and the RD have the same sequence and length. Exemplary completely or partially complementary RTT pairs are provided in Table 56. Each pair of RTT1 and RTT2 that have the same RTT pairing number can be used as the 5′ RTT and the 3′ RTT, respectively, or vice versa. In some embodiments, the 5′ RTT comprises nucleotides 1 to x of SEQ ID NO: a, and the 3′ RTT comprises nucleotides 1 to y of SEQ ID NO: b, wherein x is an integer from 10 to i, i is the length of SEQ ID NO: a, y is an integer from (i+10−x) to i, a is an integer from 1972 to 2070 or from 2401 to 2414, and b is an integer that equals (a+99). In some embodiments, a is an integer from 1972 to 1991 or from 2401 to 2414. In some embodiments, the 3′ RTT comprises nucleotides 1 to x of SEQ ID NO: a, and the 5′ RTT comprises nucleotides 1 to y of SEQ ID NO: b, wherein x is an integer from 10 to i, i is the length of SEQ ID NO: a, y is an integer from (i+10−x) to i, a is an integer from 1972 to 2070 or from 2401 to 2414, and b is an integer that equals (a+99). In some embodiments, a is an integer from 1972 to 1991 or from 2401 to 2414. x can be any integer between 10 and i, for example, from 11, 12, 13, 14, 15, 16, 17, 18, 19, 20, 21, 22, 23, 24, 25, 26, 27, 28, 29 or 30 to i, provided that i is greater or equal to x. In some embodiments, a length of x of at least 15 nucleotides is chosen. In some embodiments, x is an integer from 17 to i. In some embodiments, x is an integer from 19 to i, from 20 to i, from 27 to i, from 28 to i, or from 29 to i. In some embodiments, when the 5′ RTT and the 3′ RTT are completely complementary to each other throughout their entire length, x equals y equals i.

[0446] Alternatively, in some embodiments, a dual prime editing composition can comprise a 5′ PEgRNA and a 3′ PEgRNA, wherein the 5′ PEgRNA comprises a spacer selected from any one of Tables 1-8 and a PBS selected from the same table as the 5′ spacer, the 3′ PEgRNA comprises a spacer selected from Tables 9-55 and a PBS selected from the same table as a 3′ spacer, and wherein the 5′ RTT comprises at its 3′end nucleotides (p-12) to (p-3) of the 3′ spacer, wherein p is the length of the 3′ spacer, and the 3′ RTT comprises at its 3′ end nucleotides (q-12) to (q-3) of the 5′ spacer, wherein q is the length of the 5′ spacer. For example, when the 5′ spacer and the 3′ spacer both have a length of 20 nucleotides, the 5′ RTT comprises at its 3′ end nucleotides 8 to 17 of the 3′ spacer, and the 3′ RTT comprises at its 3′ end nucleotides 8 to 17 of the 5′ spacer. The 5′ PEgRNA is capable of complexing with a prime editor comprising a Cas9 nickase (e.g. a Cas9 having an inactivated HNH nuclease domain) to generate a first nick, and the 3′ PEgRNA is capable of complexing with a prime editor comprising a Cas9 nickase (e.g. a Cas9 having an inactivated HNH nuclease domain) to generate a second nick in the FXN gene. Accordingly, the 5′ RTT comprises a region of complementarity to the endogenous FXN sequence directly downstream of the second nick (i.e. the endogenous FXN sequence directly downstream of nucleotide 3 of the search target sequence of the 3′ PEgRNA), and the 3′ RTT comprises a region of complementarity to the endogenous FXN sequence directly downstream of the first nick (i.e. the endogenous FXN sequence directly downstream of nucleotide 3 of the search target sequence of the 5′ PEgRNA). Contacting the target FXN gene with the dual prime editing system can result in deletion of the sequence between the first nick and the second nick (the deleted region referred to as the IND) that includes the GAA repeats without insertion of an exogenous sequence. In some embodiments, the region of complementarity of the 5′ RTT to the endogenous FXN sequence is at least about 15 nucleotides in length. In some embodiments, the region of complementarity of the 5′ RTT to the endogenous FXN sequence is at least about 20 nucleotides in length. In some embodiments, the region of complementarity of the 5′ RTT to the endogenous FXN sequence is at about 20 to 30 nucleotides in length. In some embodiments, the region of complementarity of the 5′ RTT to the endogenous FXN sequence is at about 20, about 25, or about 30 nucleotides in length. In some embodiments, the region of complementarity of the 3′ RTT to the endogenous FXN sequence is at least about 15 nucleotides in length. In some embodiments, the region of complementarity of the 3′ RTT to the endogenous FXN sequence is at least about 20 nucleotides in length. In some embodiments, the region of complementarity of the 3′ RTT to the endogenous FXN sequence is at about 20 to 30 nucleotides in length. In some embodiments, the region of complementarity of the 3′ RTT to the endogenous FXN sequence is at about 20, about 25, or about 30 nucleotides in length.

[0447] Alternatively, in some embodiments, a dual prime editing composition can comprise a 5′ PEgRNA and a 3′ PEgRNA, wherein the 5′ PEgRNA comprises a spacer selected from any one of Tables 1-8 and a PBS selected from the same table as the 5′ spacer, the 3′ PEgRNA comprises a spacer selected from Tables 9-55 and a PBS selected from the same table as a 3′ spacer, and wherein the RTT of the 5′ PEgRNA (the 5′ RTT) comprise a region of complementarity to the RTT of the 3′ PEgRNA (the 3′ RTT) and further comprises nucleotides (p-12) to (p-3) of the 3′ spacer, wherein p is the length of the 3′ spacer, and wherein the 3′ RTT comprises a region of complementarity to the 5′ RTT and further comprises nucleotides (q-12) to (q-3) of the 5′ spacer, wherein q is the length of the 5′ spacer. Contacting the target FXN gene with the dual prime editing system can result in deletion of the sequence between the first nick and the second nick (the deleted region referred to as the IND) that includes the GAA repeats and insertion of the overlapping duplex (OD) encoded by the 5′ RTT and the 3′ RTT.

[0448] The 5′ PEgRNA and the 3′ PEgRNA exemplified in Tables 1-55 can comprise, from 5′ to 3′, the spacer, the gRNA core, the editing template (RTT), and the PBS. The 3′ end of the RTT can be contiguous with the 5′ end of the PBS. The PEgRNA can comprise multiple RNA molecules or can be a single RNA molecule. Any PEgRNA exemplified in Tables 1-55 may comprise, or further comprise, a 3′ motif at the 3′ end of the extension arm, or adaptations used for transcription of the PEgRNA. In some embodiments, a 3′ motif that is capable of forming a tertiary structure on its own, such as a hairpin, a pseudoknot, or other RNA structure or motif is used. In some embodiments, the 3′ motif is connected to the 3′ end of the PBS via a linker sequence. In some embodiments, the 3′ motif comprises SEQ ID NO: 2237. Without being bound by theory, such 3′ motifs are believed to increase PEgRNA stability. PEgRNA sequences exemplified in Tables 1-55 may also be adapted for expression from a nucleic acid template with a U6 promoter, for example, by including a 5′ terminal G if the spacer of the PEgRNA begins with another nucleotide, by including an additional A at the 3′ end of the extension arm, and/or by including 6 or 7 U nucleotides at the 3′ end of the extension arm. The modifications included in the selection of full length 5′ PEgRNAs included in Tables 1-55 are annotated in column 3 (Description) of the tables.

[0449] The gRNA core sequence of the 5′ PEgRNA and the gRNA core of the 3′ PEgRNA can comprise a sequence selected from any one of SEQ ID NO: 2259-60 and 2273-81. It can be advantageous to select the same gRNA core sequence for both the 5′ PEgRNA and the 3′ PEgRNA, thus avoiding the need to use two different Cas9 proteins. If no specific SEQ ID NO is annotated for the gRNA core sequence, a canonical SpCas9 gRNA core sequence (SEQ ID NO: 2260) is used. Alternative gRNA core sequences used are annotated in column 3 of Tables 1-55.

[0450] Any 5′ PEgRNA and 3′ PEgRNA sequence provided in Tables 1-55 may be chemically synthesized and may alternatively or additionally comprise one or more chemical modifications, such as phosphorothioate (PS) bond(s), 2′-O-methylated (2′-Ome) nucleotides, or a combination thereof. In some embodiments, the 5′ PEgRNA and/or the 3′ PEgRNA comprises 3′ mN*mN*mN*N and 5′mN*mN*mN* modifications, where m indicates that the nucleotide contains a 2′-O-Me modification and a * indicates the presence of a phosphorothioate bond.

[0451] In some embodiments, a dual prime editing composition for editing of the GAA repeat expansion in the FXN gene can comprise a 5′ PEgRNA having a spacer and a PBS provided in Table 1, and a 3′ PEgRNA having a spacer and a PBS provided in Table 14. The dual prime editing composition can comprise (A) a 5′ PEgRNA (also referred to as a first PEgRNA) and a (B) 3′ PEgRNA (also referred to as a second PEgRNA), wherein the first PEgRNA comprises (i) a first spacer that comprises at its 3′ end sequence number 2; (ii) a first gRNA core capable of binding to a Cas9 protein; and (iii) a first extension arm comprising a first editing template and a first primer binding site (PBS), wherein the first PBS comprises at its 5′ end sequence number 7; wherein the second PEgRNA comprises (i) a second spacer that comprises at its 3′ end sequence number 632; (ii) a second gRNA core capable of binding to a Cas9 protein; and (iii) a second extension arm comprising a second editing template and a second PBS, wherein the second PBS comprises at its 5′ end sequence number 637, and wherein (a) the first editing template comprises a region of complementarity to the second editing template, (b) the first editing template comprises nucleotides 5 to 14 of sequence number 632 and the second editing template comprises nucleotides 5 to 14 of sequence number 2, or (c) the first editing template comprises nucleotides 5 to 14 of sequence number 632 and a region of complementarity to the second editing template, and the second editing template comprises nucleotides 5 to 14 of sequence number 2 and a region of complementarity to the first editing template.

[0452] The 5′ PEgRNA spacer can be, for example, 17 to 22 nucleotides in length, and can comprise any one of sequence numbers 1-6. In some embodiments, the 5′ PEgRNA spacer comprises sequence number 1. In some embodiments, the 5′ PEgRNA spacer is 20 nucleotides in length. The PBS of the 5′ PEgRNA can be, for example, 5 to 19 nucleotides in length, and comprise any one of sequence numbers 7-21. In some embodiments, the PBS is 8 to 17 nucleotides in length. In some embodiments, the PBS is 8 to 16 nucleotides in length and comprises any one of sequence numbers 10 to 18. In some embodiments, the PBS is 10 to 12 nucleotides in length and comprises any one of sequence numbers 12 to 14. In some embodiments, the PBS is 10 or 12 nucleotides in length and comprises sequence 12 or 14, respectively.

[0453] The 3′ PEgRNA spacer can be, for example, 17 to 22 nucleotides in length, and can comprise any one of sequence numbers 631-636. In some embodiments, the 3′ PEgRNA spacer comprises sequence number 631. In some embodiments, the 5′ PEgRNA spacer is 20 nucleotides in length. The PBS of the 5′ PEgRNA can be, for example, 5 to 19 nucleotides in length, and comprise any one of sequence numbers 637-651. In some embodiments, the PBS is 8 to 17 nucleotides in length. In some embodiments, the PBS is 8 to 16 nucleotides in length and comprises any one of sequence numbers 640 to 648. In some embodiments, the PBS is 10 to 12 nucleotides in length and comprises any one of sequence numbers 642 to 644. In some embodiments, the PBS is 10 or 12 nucleotides in length and comprises sequence 642 or 644, respectively.

[0454] In some embodiments, the dual prime editing composition comprises a 5′ PEgRNA having a spacer and a PBS provided in Table 1, and a 3′ PEgRNA having a spacer and a PBS provided in Table 14, wherein the RTT of the 5′ PEgRNA (the 5′ RTT) comprise a region of complementarity to the RTT of the 3′ PEgRNA (the 3′ RTT). The 5′ PEgRNA is capable of complexing with a prime editor comprising a Cas9 nickase (e.g. a Cas9 having an inactivated HNH nuclease domain) to generate a first nick, and the 3′ PEgRNA is capable of complexing with a prime editor comprising a Cas9 nickase (e.g. a Cas9 having an inactivated HNH nuclease domain) to generate a second nick on the FXN gene. Accordingly, contacting the target FXN gene with the dual prime editing system can result in deletion of the sequence between the first nick and the second nick (the deleted region referred to as the IND) that includes the GAA repeats and insertion of the replacement duplex (RD) encoded by the 5′ RTT and the 3′ RTT. Exemplary completely or partially complementary RTT pairs are provided in Table 56. Each pair of RTT1 and RTT2 that have the same RTT pairing number can be used as the 5′ RTT and the 3′ RTT, respectively, or vice versa. In some embodiments, the 5′ RTT comprises nucleotides 1 to x of SEQ ID NO: a, and the 3′ RTT comprises nucleotides 1 to y of SEQ ID NO: b, wherein x is an integer from 10 to i, i is the length of SEQ ID NO: a, y is an integer from (i+10−x) to i, a is an integer from 1972 to 2070 or from 2401 to 2414, and b is an integer that equals (a+99). In some embodiments, a is an integer from 1972 to 1991 or from 2401 to 2414. In some embodiments, the 3′ RTT comprises nucleotides 1 to x of SEQ ID NO: a, and the 5′ RTT comprises nucleotides 1 to y of SEQ ID NO: b, wherein x is an integer from 10 to i, i is the length of SEQ ID NO: a, y is an integer from (i+10−x) to i, a is an integer from 1972 to 2070 or from 2401 to 2414, and b is an integer that equals (a+99). In some embodiments, a is an integer from 1972 to 1991 or from 2401 to 2414. x can be any integer between 10 and i, for example, from 11, 12, 13, 14, 15, 16, 17, 18, 19, 20, 21, 22, 23, 24, 25, 26, 27, 28, 29 or 30 to i, provided that i is greater or equal to x. In some embodiments, a length of x of at least 15 nucleotides is chosen. In some embodiments, x is an integer from 17 to i. In some embodiments, x is an integer from 19 to i, from 20 to i, from 27 to i, from 28 to i, or from 29 to i. In some embodiments, when the 5′ RTT and the 3′ RTT are completely complementary to each other throughout their entire length, x equals y equals i. In some embodiments, a is 1972 and b is 2071. In some embodiments, a is 1979, 1982, 1985, 1986, or 1991.

[0455] Alternatively, in some embodiments, the dual prime editing composition can comprise the dual prime editing composition comprises a 5′ PEgRNA having a spacer and a PBS provided in Table 1, and a 3′ PEgRNA having a spacer and a PBS provided in Table 14, wherein the first editing template comprises nucleotides 5 to 14 of sequence number 632 and the second editing template comprises nucleotides 5 to 14 of sequence number 2. The 5′ PEgRNA is capable of complexing with a prime editor comprising a Cas9 nickase (e.g. a Cas9 having an inactivated HNH nuclease domain) to generate a first nick, and the 3′ PEgRNA is capable of complexing with a prime editor comprising a Cas9 nickase (e.g. a Cas9 having an inactivated HNH nuclease domain) to generate a second nick in the FXN gene. Accordingly, the 5′ RTT comprises a region of complementarity to the endogenous FXN sequence directly downstream of the second nick (i.e. the endogenous FXN sequence directly downstream of nucleotide 3 of the search target sequence of the 3′ PEgRNA), and the 3′ RTT comprises a region of complementarity to the endogenous FXN sequence directly downstream of the first nick (i.e. the endogenous FXN sequence directly downstream of nucleotide 3 of the search target sequence of the 5′ PEgRNA). Contacting the target FXN gene with the dual prime editing system can result in deletion of the sequence between the first nick and the second nick (the deleted region referred to as the IND) that includes the GAA repeats without insertion of an exogenous sequence. In some embodiments, the region of complementarity of the 5′ RTT to the endogenous FXN sequence is at least about 15 nucleotides in length. In some embodiments, the region of complementarity of the 5′ RTT to the endogenous FXN sequence is at least about 20 nucleotides in length. In some embodiments, the region of complementarity of the 5′ RTT to the endogenous FXN sequence is at about 20 to 30 nucleotides in length. In some embodiments, the region of complementarity of the 5′ RTT to the endogenous FXN sequence is at about 20, about 25, or about 30 nucleotides in length. In some embodiments, the region of complementarity of the 3′ RTT to the endogenous FXN sequence is at least about 15 nucleotides in length. In some embodiments, the region of complementarity of the 3′ RTT to the endogenous FXN sequence is at least about 20 nucleotides in length. In some embodiments, the region of complementarity of the 3′ RTT to the endogenous FXN sequence is at about 20 to 30 nucleotides in length. In some embodiments, the region of complementarity of the 3′ RTT to the endogenous FXN sequence is at about 20, about 25, or about 30 nucleotides in length. In some embodiments, the 5′ RTT comprises nucleotides 21-30 of sequence number 2172. In some embodiments, the 5′ RTT comprises nucleotides 16-30 of sequence number 2172. In some embodiments, the 5′ RTT comprises sequence number 2170, 2171, or 2172.

[0456] Alternatively, in some embodiments, the dual prime editing composition can comprise the dual prime editing composition comprises a 5′ PEgRNA having a spacer and a PBS provided in Table 1, and a 3′ PEgRNA having a spacer and a PBS provided in Table 14, and wherein the first editing template comprises nucleotides 5 to 14 of sequence number 632 and a region of complementarity to the second editing template, and the second editing template comprises nucleotides 5 to 14 of sequence number 2 and a region of complementarity to the first editing template. Contacting the target FXN gene with the dual prime editing system can result in deletion of the sequence between the first nick and the second nick (the deleted region referred to as the IND) that includes the GAA repeats and insertion of the overlapping duplex (OD) encoded by the 5′ RTT and the 3′ RTT.

[0457] The 5′ PEgRNA and the 3′ PEgRNA exemplified in Tables 1 and 14 can comprise, from 5′ to 3′, the spacer, the gRNA core, the editing template (RTT), and the PBS. The 3′ end of the RTT can be contiguous with the 5′ end of the PBS. The PEgRNA can comprise multiple RNA molecules or can be a single RNA molecule. Any PEgRNA exemplified in Tables 1 and 14 may comprise, or further comprise, a 3′ motif at the 3′ end of the extension arm, or adaptations used for transcription of the PEgRNA. In some embodiments, a 3′ motif that is capable of forming a tertiary structure on its own, such as a hairpin, a pseudoknot, or other RNA structure or motif is used. In some embodiments, the 3′ motif is connected to the 3′ end of the PBS via a linker sequence. In some embodiments, the 3′ motif comprises SEQ ID NO:2237. Without being bound by theory, such 3′ motifs are believed to increase PEgRNA stability. PEgRNA sequences exemplified in Tables 1 and 14 may also be adapted for expression from a nucleic acid template with a U6 promoter, for example, by including a 5′ terminal G if the spacer of the PEgRNA begins with another nucleotide, by including an additional A at the 3′ end of the extension arm, and/or by including 6 or 7 U nucleotides at the 3′ end of the extension arm. The modifications included in the selection of full length 5′ PEgRNAs included in Tables 1 and 14 are annotated in column 3 (Description) of the tables.

[0458] The gRNA core sequence of the 5′ PEgRNA and the gRNA core of the 3′ PEgRNA can comprise a sequence selected from any one of SEQ ID NO: 2259-2260 and 2273-2281. It can be advantageous to select the same gRNA core sequence for both the 5′ PEgRNA and the 3′ PEgRNA, thus avoiding the need to use two different Cas9 proteins. If no specific SEQ ID NO is annotated for the gRNA core sequence, a canonical SpCas9 gRNA core sequence (SEQ ID NO: 2260) is used. Alternative gRNA core sequences used are annotated in column 3 of Tables 1 and 14. In some embodiments, the gRNA core of the 5′ PEgRNA and/or the 3′ PEgRNA comprise SEQ ID NO: 2260. In some embodiments, the gRNA core of the 5′ PEgRNA and/or the 3′ PEgRNA comprise SEQ ID NO: 2259.

[0459] Any 5′ PEgRNA and 3′ PEgRNA sequence provided in Tables 1 and 14 may be chemically synthesized and may alternatively or additionally comprise one or more chemical modifications, such as phosphorothioate (PS) bond(s), 2′-O-methylated (2′-Ome) nucleotides, or a combination thereof. In some embodiments, the 5′ PEgRNA and/or the 3′ PEgRNA comprises 3′ mN*mN*mN*N and 5′mN*mN*mN* modifications, where m indicates that the nucleotide contains a 2′-O-Me modification and a * indicates the presence of a phosphorothioate bond.

[0460] In some embodiments, the dual prime editing composition comprises a 5′ PEgRNA and a 3′ PEgRNA, wherein the 5′ PEgRNA comprises sequence number 22, 23, 24, 25, 66, 67, 68, 69, 70, 71, 72, 73, 74, 75, 76, 77, 78, 79, 80, 81, 82, 83, 84, 85, 86, 87, 88, 89, 90, 91, 92, 93, 94, 95, 96, 98, 99, or 100, and wherein the 3′ PEgRNA comprises sequence number 652, 653, 654, 655, 708, 709, 710, 711, 712, 713, 714, 715, 716, 717, 718, 719, 720, 721, 722, 723, 724, 725, 726, 727, 728, 729, 730, 731, 732, 733, 734, 735, 736, 737, 738, or 739.

[0461] In some embodiments, the dual prime editing composition comprises a 5′ PEgRNA and a 3′ PEgRNA, wherein the 5′ PEgRNA comprises sequence number 22, 23, 24, 25, 73, 98, 99, or 100, and wherein the 3′ PEgRNA comprises sequence number 652, 653, 654, 655, 724, 725, 726, 727, 728, 729, 730, 731, 732, 733, 734, 735, 736, 737, 738, or 739.

[0462] In some embodiments, the dual prime editing composition comprises a 5′ PEgRNA and a 3′ PEgRNA, wherein the 5′ PEgRNA comprises sequence number 26 or 27, and wherein the 3′ PEgRNA comprises sequence number 656 or 657. In some embodiments, the dual prime editing composition comprises a 5′ PEgRNA and a 3′ PEgRNA, wherein the 5′ PEgRNA comprises sequence number 28 or 29, and wherein the 3′ PEgRNA comprises sequence number 658 or 659. In some embodiments, the dual prime editing composition comprises a 5′ PEgRNA and a 3′ PEgRNA, wherein the 5′ PEgRNA comprises sequence number 30 or 31, and wherein the 3′ PEgRNA comprises sequence number 660 or 661. In some embodiments, the dual prime editing composition comprises a 5′ PEgRNA and a 3′ PEgRNA, wherein the 5′ PEgRNA comprises sequence number 32 or 33, and wherein the 3′ PEgRNA comprises sequence number 662 or 663. In some embodiments, the dual prime editing composition comprises a 5′ PEgRNA and a 3′ PEgRNA, wherein the 5′ PEgRNA comprises sequence number 34 or 35, and wherein the 3′ PEgRNA comprises sequence number 664 or 665. In some embodiments, the dual prime editing composition comprises a 5′ PEgRNA and a 3′ PEgRNA, wherein the 5′ PEgRNA comprises sequence number 36 or 37, and wherein the 3′ PEgRNA comprises sequence number 666 or 667. In some embodiments, the dual prime editing composition comprises a 5′ PEgRNA and a 3′ PEgRNA, wherein the 5′ PEgRNA comprises sequence number 38 or 39, and wherein the 3′ PEgRNA comprises sequence number 668 or 669. In some embodiments, the dual prime editing composition comprises a 5′ PEgRNA and a 3′ PEgRNA, wherein the 5′ PEgRNA comprises sequence number 40 or 41, and wherein the 3′ PEgRNA comprises sequence number 670 or 671. In some embodiments, the dual prime editing composition comprises a 5′ PEgRNA and a 3′ PEgRNA, wherein the 5′ PEgRNA comprises sequence number 42 or 43, and wherein the 3′ PEgRNA comprises sequence number 672 or 673. In some embodiments, the dual prime editing composition comprises a 5′ PEgRNA and a 3′ PEgRNA, wherein the 5′ PEgRNA comprises sequence number 44 or 45, and wherein the 3′ PEgRNA comprises sequence number 674 or 675. In some embodiments, the dual prime editing composition comprises a 5′ PEgRNA and a 3′ PEgRNA, wherein the 5′ PEgRNA comprises sequence number 46 or 47, and wherein the 3′ PEgRNA comprises sequence number 676 or 677. In some embodiments, the dual prime editing composition comprises a 5′ PEgRNA and a 3′ PEgRNA, wherein the 5′ PEgRNA comprises sequence number 48 or 49, and wherein the 3′ PEgRNA comprises sequence number 678 or 679. In some embodiments, the dual prime editing composition comprises a 5′ PEgRNA and a 3′ PEgRNA, wherein the 5′ PEgRNA comprises sequence number 50 or 51, and wherein the 3′ PEgRNA comprises sequence number 680 or 681. In some embodiments, the dual prime editing composition comprises a 5′ PEgRNA and a 3′ PEgRNA, wherein the 5′ PEgRNA comprises sequence number 52 or 53, and wherein the 3′ PEgRNA comprises sequence number 682 or 683. In some embodiments, the dual prime editing composition comprises a 5′ PEgRNA and a 3′ PEgRNA, wherein the 5′ PEgRNA comprises sequence number 54 or 55, and wherein the 3′ PEgRNA comprises sequence number 684 or 685. In some embodiments, the dual prime editing composition comprises a 5′ PEgRNA and a 3′ PEgRNA, wherein the 5′ PEgRNA comprises sequence number 56 or 57, and wherein the 3′ PEgRNA comprises sequence number 686 or 687. In some embodiments, the dual prime editing composition comprises a 5′ PEgRNA and a 3′ PEgRNA, wherein the 5′ PEgRNA comprises sequence number 58 or 59, and wherein the 3′ PEgRNA comprises sequence number 688 or 689. In some embodiments, the dual prime editing composition comprises a 5′ PEgRNA and a 3′ PEgRNA, wherein the 5′ PEgRNA comprises sequence number 60 or 61, and wherein the 3′ PEgRNA comprises sequence number 690 or 691. In some embodiments, the dual prime editing composition comprises a 5′ PEgRNA and a 3′ PEgRNA, wherein the 5′ PEgRNA comprises sequence number 62 or 63, and wherein the 3′ PEgRNA comprises sequence number 692 or 693. In some embodiments, the dual prime editing composition comprises a 5′ PEgRNA and a 3′ PEgRNA, wherein the 5′ PEgRNA comprises sequence number 64 or 65, and wherein the 3′ PEgRNA comprises sequence number 694 or 695. In some embodiments, the dual prime editing composition comprises a 5′ PEgRNA and a 3′ PEgRNA, wherein the 5′ PEgRNA comprises sequence number 2514, and wherein the 3′ PEgRNA comprises sequence number 2542 or 2546. In some embodiments, the dual prime editing composition comprises a 5′ PEgRNA and a 3′ PEgRNA, wherein the 5′ PEgRNA comprises sequence number 2515, and wherein the 3′ PEgRNA comprises sequence number 2543 or 2547. In some embodiments, the dual prime editing composition comprises a 5′ PEgRNA and a 3′ PEgRNA, wherein the 5′ PEgRNA comprises sequence number 2518, and wherein the 3′ PEgRNA comprises sequence number 2542 or 2546. In some embodiments, the dual prime editing composition comprises a 5′ PEgRNA and a 3′ PEgRNA, wherein the 5′ PEgRNA comprises sequence number 2519, and wherein the 3′ PEgRNA comprises sequence number 2543 or 2547. Contacting the target FXN gene with the dual prime editing system can result in deletion of the sequence between the first nick and the second nick (the deleted region referred to as the IND) that includes the GAA repeats and insertion of the replacement duplex (RD) encoded by the 5′ RTT and the 3′ RTT.

[0463] In some embodiments, a dual prime editing composition for editing of the GAA repeat expansion in the FXN gene can comprise a 5′ PEgRNA having a spacer and a PBS provided in Table 1, and a 3′ PEgRNA having a spacer and a PBS provided in Table 25. The dual prime editing composition can comprise (A) a 5′ PEgRNA (also referred to as a first PEgRNA) and a (B) 3′ PEgRNA (also referred to as a second PEgRNA), wherein the first PEgRNA comprises (i) a first spacer that comprises at its 3′ end sequence number 2; (ii) a first gRNA core capable of binding to a Cas9 protein; and (iii) a first extension arm comprising a first editing template and a first primer binding site (PBS), wherein the first PBS comprises at its 5′ end sequence number 7; wherein the second PEgRNA comprises (i) a second spacer that comprises at its 3′ end sequence number 1018; (ii) a second gRNA core capable of binding to a Cas9 protein; and (iii) a second extension arm comprising a second editing template and a second PBS, wherein the second PBS comprises at its 5′ end sequence number 1023, and wherein (a) the first editing template comprises a region of complementarity to the second editing template, (b) the first editing template comprises nucleotides 5 to 14 of sequence number 1018 and the second editing template comprises nucleotides 5 to 14 of sequence number 2, or (c) the first editing template comprises nucleotides 5 to 14 of sequence number 1018 and a region of complementarity to the second editing template, and the second editing template comprises nucleotides 5 to 14 of sequence number 2 and a region of complementarity to the first editing template.

[0464] The 5′ PEgRNA spacer can be, for example, 17 to 22 nucleotides in length, and can comprise any one of sequence numbers 1-6. In some embodiments, the 5′ PEgRNA spacer comprises sequence number 1. In some embodiments, the 5′ PEgRNA spacer is 20 nucleotides in length. The PBS of the 5′ PEgRNA can be, for example, 5 to 19 nucleotides in length, and comprise any one of sequence numbers 7-21. In some embodiments, the PBS is 8 to 17 nucleotides in length. In some embodiments, the PBS is 8 to 16 nucleotides in length and comprises any one of sequence numbers 10 to 18. In some embodiments, the PBS is 10 to 12 nucleotides in length and comprises any one of sequence numbers 12 to 14. In some embodiments, the PBS is 10 or 12 nucleotides in length and comprises sequence 12 or 14, respectively.

[0465] The 3′ PEgRNA spacer can be, for example, 17 to 22 nucleotides in length, and can comprise any one of sequence numbers 1017-1022. In some embodiments, the 3′ PEgRNA spacer comprises sequence number 1017. In some embodiments, the 5′ PEgRNA spacer is 20 nucleotides in length. The PBS of the 5′ PEgRNA can be, for example, 5 to 19 nucleotides in length, and comprise any one of sequence numbers 1023-1037. In some embodiments, the PBS is 8 to 17 nucleotides in length. In some embodiments, the PBS is 8 to 16 nucleotides in length and comprises any one of sequence numbers 1026 to 1034. In some embodiments, the PBS is 10 to 12 nucleotides in length and comprises any one of sequence numbers 1028 to 1030. In some embodiments, the PBS is 10 or 12 nucleotides in length and comprises sequence 1928 or 1030, respectively.

[0466] In some embodiments, the dual prime editing composition comprises a 5′ PEgRNA having a spacer and a PBS provided in Table 1, and a 3′ PEgRNA having a spacer and a PBS provided in Table 25, wherein the RTT of the 5′ PEgRNA (the 5′ RTT) comprise a region of complementarity to the RTT of the 3′ PEgRNA (the 3′ RTT). The 5′ PEgRNA is capable of complexing with a prime editor comprising a Cas9 nickase (e.g. a Cas9 having an inactivated HNH nuclease domain) to generate a first nick, and the 3′ PEgRNA is capable of complexing with a prime editor comprising a Cas9 nickase (e.g. a Cas9 having an inactivated HNH nuclease domain) to generate a second nick on the FXN gene. Accordingly, contacting the target FXN gene with the dual prime editing system can result in deletion of the sequence between the first nick and the second nick (the deleted region referred to as the IND) that includes the GAA repeats and insertion of the replacement duplex (RD) encoded by the 5′ RTT and the 3′ RTT. Exemplary completely or partially complementary RTT pairs are provided in Table 56. Each pair of RTT1 and RTT2 that have the same RTT pairing number can be used as the 5′ RTT and the 3′ RTT, respectively, or vice versa. In some embodiments, the 5′ RTT comprises nucleotides 1 to x of SEQ ID NO: a, and the 3′ RTT comprises nucleotides 1 to y of SEQ ID NO: b, wherein x is an integer from 10 to i, i is the length of SEQ ID NO: a, y is an integer from (i+10−x) to i, a is an integer from 1972 to 2070 or from 2401 to 2414, and b is an integer that equals (a+99). In some embodiments, a is an integer from 1972 to 1991 or from 2401 to 2414. In some embodiments, the 3′ RTT comprises nucleotides 1 to x of SEQ ID NO: a, and the 5′ RTT comprises nucleotides 1 to y of SEQ ID NO: b, wherein x is an integer from 10 to i, i is the length of SEQ ID NO: a, y is an integer from (i+10−x) to i, a is an integer from 1972 to 2070 or from 2401 to 2414, and b is an integer that equals (a+99). In some embodiments, a is an integer from 1972 to 1991 or from 2401 to 2414. x can be any integer between 10 and I, for example, from 11, 12, 13, 14, 15, 16, 17, 18, 19, 20, 21, 22, 23, 24, 25, 26, 27, 28, 29 or 30 to i, provided that i is greater or equal to x. In some embodiments, a length of x of at least 15 nucleotides is chosen. In some embodiments, x is an integer from 17 to i. In some embodiments, x is an integer from 19 to, from 20 to i, from 27 to i, from 28 to i, or from 29 to i. In some embodiments, when the 5′ RTT and the 3′ RTT are completely complementary to each other throughout their entire length, x equals y equals i. In some embodiments, a is 1972 and b is 2071. In some embodiments, a is 1979, 1982, 1985, 1986, or 1991.

[0467] Alternatively, in some embodiments, the dual prime editing composition can comprise the dual prime editing composition comprises a 5′ PEgRNA having a spacer and a PBS provided in Table 1, and a 3′ PEgRNA having a spacer and a PBS provided in Table 25, wherein the first editing template comprises nucleotides 5 to 14 of sequence number 1018 and the second editing template comprises nucleotides 5 to 14 of sequence number 2. The 5′ PEgRNA is capable of complexing with a prime editor comprising a Cas9 nickase (e.g. a Cas9 having an inactivated HNH nuclease domain) to generate a first nick, and the 3′ PEgRNA is capable of complexing with a prime editor comprising a Cas9 nickase (e.g. a Cas9 having an inactivated HNH nuclease domain) to generate a second nick in the FXN gene. Accordingly, the 5′ RTT comprises a region of complementarity to the endogenous FXN sequence directly downstream of the second nick (i.e. the endogenous FXN sequence directly downstream of nucleotide 3 of the search target sequence of the 3′ PEgRNA), and the 3′ RTT comprises a region of complementarity to the endogenous FXN sequence directly downstream of the first nick (i.e. the endogenous FXN sequence directly downstream of nucleotide 3 of the search target sequence of the 5′ PEgRNA). Contacting the target FXN gene with the dual prime editing system can result in deletion of the sequence between the first nick and the second nick (the deleted region referred to as the IND) that includes the GAA repeats without insertion of an exogenous sequence. In some embodiments, the region of complementarity of the 5′ RTT to the endogenous FXN sequence is at least about 15 nucleotides in length. In some embodiments, the region of complementarity of the 5′ RTT to the endogenous FXN sequence is at least about 20 nucleotides in length. In some embodiments, the region of complementarity of the 5′ RTT to the endogenous FXN sequence is at about 20 to 30 nucleotides in length. In some embodiments, the region of complementarity of the 5′ RTT to the endogenous FXN sequence is at about 20, about 25, or about 30 nucleotides in length. In some embodiments, the region of complementarity of the 3′ RTT to the endogenous FXN sequence is at least about 15 nucleotides in length. In some embodiments, the region of complementarity of the 3′ RTT to the endogenous FXN sequence is at least about 20 nucleotides in length. In some embodiments, the region of complementarity of the 3′ RTT to the endogenous FXN sequence is at about 20 to 30 nucleotides in length. In some embodiments, the region of complementarity of the 3′ RTT to the endogenous FXN sequence is at about 20, about 25, or about 30 nucleotides in length. In some embodiments, the 5′ RTT comprises nucleotides 21-30 of sequence number 2172. In some embodiments, the 5′ RTT comprises nucleotides 16-30 of sequence number 2172. In some embodiments, the 5′ RTT comprises sequence number 2170, 2171, or 2172.

[0468] Alternatively, in some embodiments, the dual prime editing composition can comprise the dual prime editing composition comprises a 5′ PEgRNA having a spacer and a PBS provided in Table 1, and a 3′ PEgRNA having a spacer and a PBS provided in Table 25, and wherein the first editing template comprises nucleotides 5 to 14 of sequence number 1018 and a region of complementarity to the second editing template, and the second editing template comprises nucleotides 5 to 14 of sequence number 2 and a region of complementarity to the first editing template. Contacting the target FXN gene with the dual prime editing system can result in deletion of the sequence between the first nick and the second nick (the deleted region referred to as the IND) that includes the GAA repeats and insertion of the overlapping duplex (OD) encoded by the 5′ RTT and the 3′ RTT.

[0469] The 5′ PEgRNA and the 3′ PEgRNA exemplified in Tables 1 and 25 can comprise, from 5′ to 3′, the spacer, the gRNA core, the editing template (RTT), and the PBS. The 3′ end of the RTT can be contiguous with the 5′ end of the PBS. The PEgRNA can comprise multiple RNA molecules or can be a single RNA molecule. Any PEgRNA exemplified in Tables 1 and 25 may comprise, or further comprise, a 3′ motif at the 3′ end of the extension arm, or adaptations used for transcription of the PEgRNA. In some embodiments, a 3′ motif that is capable of forming a tertiary structure on its own, such as a hairpin, a pseudoknot, or other RNA structure or motif is used. In some embodiments, the 3′ motif is connected to the 3′ end of the PBS via a linker sequence. In some embodiments, the 3′ motif comprises SEQ ID NO: 2237. Without being bound by theory, such 3′ motifs are believed to increase PEgRNA stability. PEgRNA sequences exemplified in Tables 1 and 25 may also be adapted for expression from a nucleic acid template with a U6 promoter, for example, by including a 5′ terminal G if the spacer of the PEgRNA begins with another nucleotide, by including an additional A at the 3′ end of the extension arm, and/or by including 6 or 7 U nucleotides at the 3′ end of the extension arm. The modifications included in the selection of full length 5′ PEgRNAs included in Tables 1 and 25 are annotated in column 3 (Description) of the tables.

[0470] The gRNA core sequence of the 5′ PEgRNA and the gRNA core of the 3′ PEgRNA can comprise a sequence selected from any one of SEQ ID NO: 2259-2260 and 2273-2281. It can be advantageous to select the same gRNA core sequence for both the 5′ PEgRNA and the 3′ PEgRNA, thus avoiding the need to use two different Cas9 proteins. If no specific SEQ ID NO is annotated for the gRNA core sequence, a canonical SpCas9 gRNA core sequence (SEQ ID NO: 2260) is used. Alternative gRNA core sequences used are annotated in column 3 of Tables 1 and 25. In some embodiments, the gRNA core of the 5′ PEgRNA and/or the 3′ PEgRNA comprise SEQ ID NO: 2260. In some embodiments, the gRNA core of the 5′ PEgRNA and/or the 3′ PEgRNA comprise 2259.

[0471] Any 5′ PEgRNA and 3′ PEgRNA sequence provided in Tables 1 and 25 may be chemically synthesized and may alternatively or additionally comprise one or more chemical modifications, such as phosphorothioate (PS) bond(s), 2′-O-methylated (2′-Ome) nucleotides, or a combination thereof. In some embodiments, the 5′ PEgRNA and/or the 3′ PEgRNA comprises 3′ mN*mN*mN*N and 5′mN*mN*mN* modifications, where m indicates that the nucleotide contains a 2′-O-Me modification and a * indicates the presence of a phosphorothioate bond.

[0472] In some embodiments, the dual prime editing composition comprises a 5′ PEgRNA and a 3′ PEgRNA, wherein the 5′ PEgRNA comprises sequence number 22, 23, 24, 25, 66, 67, 68, 69, 70, 71, 72, 73, 74, 75, 76, 77, 78, 79, 80, 81, 82, 83, 84, 85, 86, 87, 88, 89, 90, 91, 92, 93, 94, 95, 96, 98, 99, or 100, and wherein the 3′ PEgRNA comprises sequence number 1038, 1039, 1040, 1041, 1094, 1095, 1096, 1097, 1098, 1099, 1100, 1101, 1102, 1103, 1104, 1105, 1106, 1107, 1108, 1109, 1110, 1111, 1112, 1113, 1114, 1115, 1116, 1117, 1118, 1119, 1120, 1121, 1122, 1123, 1124, 1125, 1128, 1129, 1130, or 1131.

[0473] In some embodiments, the dual prime editing composition comprises a 5′ PEgRNA and a 3′ PEgRNA, wherein the 5′ PEgRNA comprises sequence number 22, 23, 24, 25, 73, 98, 99, or 100, and wherein the 3′ PEgRNA comprises sequence number 1038, 1039, 1040, 1041, 1098, or 1101.

[0474] In some embodiments, the dual prime editing composition comprises a 5′ PEgRNA and a 3′ PEgRNA, wherein the 5′ PEgRNA comprises sequence number 26 or 27, and wherein the 3′ PEgRNA comprises sequence number 1042 or 1043. In some embodiments, the dual prime editing composition comprises a 5′ PEgRNA and a 3′ PEgRNA, wherein the 5′ PEgRNA comprises sequence number 28 or 29, and wherein the 3′ PEgRNA comprises sequence number 1044 or 1045. In some embodiments, the dual prime editing composition comprises a 5′ PEgRNA and a 3′ PEgRNA, wherein the 5′ PEgRNA comprises sequence number 30 or 31, and wherein the 3′ PEgRNA comprises sequence number 1046 or 1047. In some embodiments, the dual prime editing composition comprises a 5′ PEgRNA and a 3′ PEgRNA, wherein the 5′ PEgRNA comprises sequence number 32 or 33, and wherein the 3′ PEgRNA comprises sequence number 1048 or 1049. In some embodiments, the dual prime editing composition comprises a 5′ PEgRNA and a 3′ PEgRNA, wherein the 5′ PEgRNA comprises sequence number 34 or 35, and wherein the 3′ PEgRNA comprises sequence number 1050 or 1051. In some embodiments, the dual prime editing composition comprises a 5′ PEgRNA and a 3′ PEgRNA, wherein the 5′ PEgRNA comprises sequence number 36 or 37, and wherein the 3′ PEgRNA comprises sequence number 1052 or 1053. In some embodiments, the dual prime editing composition comprises a 5′ PEgRNA and a 3′ PEgRNA, wherein the 5′ PEgRNA comprises sequence number 38 or 39, and wherein the 3′ PEgRNA comprises sequence number 1054 or 1055. In some embodiments, the dual prime editing composition comprises a 5′ PEgRNA and a 3′ PEgRNA, wherein the 5′ PEgRNA comprises sequence number 40 or 41, and wherein the 3′ PEgRNA comprises sequence number 1056 or 1057. In some embodiments, the dual prime editing composition comprises a 5′ PEgRNA and a 3′ PEgRNA, wherein the 5′ PEgRNA comprises sequence number 42 or 43, and wherein the 3′ PEgRNA comprises sequence number 1058 or 1059. In some embodiments, the dual prime editing composition comprises a 5′ PEgRNA and a 3′ PEgRNA, wherein the 5′ PEgRNA comprises sequence number 44 or 45, and wherein the 3′ PEgRNA comprises sequence number 1060 or 1061. In some embodiments, the dual prime editing composition comprises a 5′ PEgRNA and a 3′ PEgRNA, wherein the 5′ PEgRNA comprises sequence number 46 or 47, and wherein the 3′ PEgRNA comprises sequence number 1062 or 1063. In some embodiments, the dual prime editing composition comprises a 5′ PEgRNA and a 3′ PEgRNA, wherein the 5′ PEgRNA comprises sequence number 48 or 49, and wherein the 3′ PEgRNA comprises sequence number 1064 or 1065. In some embodiments, the dual prime editing composition comprises a 5′ PEgRNA and a 3′ PEgRNA, wherein the 5′ PEgRNA comprises sequence number 50 or 51, and wherein the 3′ PEgRNA comprises sequence number 1066 or 1067. In some embodiments, the dual prime editing composition comprises a 5′ PEgRNA and a 3′ PEgRNA, wherein the 5′ PEgRNA comprises sequence number 52 or 53, and wherein the 3′ PEgRNA comprises sequence number 1068 or 1069. In some embodiments, the dual prime editing composition comprises a 5′ PEgRNA and a 3′ PEgRNA, wherein the 5′ PEgRNA comprises sequence number 54 or 55, and wherein the 3′ PEgRNA comprises sequence number 1070 or 1071. In some embodiments, the dual prime editing composition comprises a 5′ PEgRNA and a 3′ PEgRNA, wherein the 5′ PEgRNA comprises sequence number 56 or 57, and wherein the 3′ PEgRNA comprises sequence number 1072 or 1073. In some embodiments, the dual prime editing composition comprises a 5′ PEgRNA and a 3′ PEgRNA, wherein the 5′ PEgRNA comprises sequence number 58 or 59, and wherein the 3′ PEgRNA comprises sequence number 1074 or 1075. In some embodiments, the dual prime editing composition comprises a 5′ PEgRNA and a 3′ PEgRNA, wherein the 5′ PEgRNA comprises sequence number 60 or 61, and wherein the 3′ PEgRNA comprises sequence number 1076 or 1077. In some embodiments, the dual prime editing composition comprises a 5′ PEgRNA and a 3′ PEgRNA, wherein the 5′ PEgRNA comprises sequence number 62 or 63, and wherein the 3′ PEgRNA comprises sequence number 1078 or 1079. In some embodiments, the dual prime editing composition comprises a 5′ PEgRNA and a 3′ PEgRNA, wherein the 5′ PEgRNA comprises sequence number 64 or 65, and wherein the 3′ PEgRNA comprises sequence number 1080 or 1081. In some embodiments, the dual prime editing composition comprises a 5′ PEgRNA and a 3′ PEgRNA, wherein the 5′ PEgRNA comprises sequence number 2516, and wherein the 3′ PEgRNA comprises sequence number 2549 or 2555. In some embodiments, the dual prime editing composition comprises a 5′ PEgRNA and a 3′ PEgRNA, wherein the 5′ PEgRNA comprises sequence number 2517, and wherein the 3′ PEgRNA comprises sequence number 2550 or 2556. In some embodiments, the dual prime editing composition comprises a 5′ PEgRNA and a 3′ PEgRNA, wherein the 5′ PEgRNA comprises sequence number 2520, and wherein the 3′ PEgRNA comprises sequence number 2549 or 2555. In some embodiments, the dual prime editing composition comprises a 5′ PEgRNA and a 3′ PEgRNA, wherein the 5′ PEgRNA comprises sequence number 2521, and wherein the 3′ PEgRNA comprises sequence number 2550 or 2556. Contacting the target FXN gene with the dual prime editing system can result in deletion of the sequence between the first nick and the second nick (the deleted region referred to as the IND) that includes the GAA repeats and insertion of the replacement duplex (RD) encoded by the 5′ RTT and the 3′ RTT.

[0475] In some embodiments, a dual prime editing composition for editing of the GAA repeat expansion in the FXN gene can comprise a 5′ PEgRNA having a spacer and a PBS provided in Table 1, and a 3′ PEgRNA having a spacer and a PBS provided in Table 29. The dual prime editing composition can comprise (A) a 5′ PEgRNA (also referred to as a first PEgRNA) and a (B) 3′ PEgRNA (also referred to as a second PEgRNA), wherein the first PEgRNA comprises (i) a first spacer that comprises at its 3′ end sequence number 2; (ii) a first gRNA core capable of binding to a Cas9 protein; and (iii) a first extension arm comprising a first editing template and a first primer binding site (PBS), wherein the first PBS comprises at its 5′ end sequence number 7; wherein the second PEgRNA comprises (i) a second spacer that comprises at its 3′ end sequence number 1216; (ii) a second gRNA core capable of binding to a Cas9 protein; and (iii) a second extension arm comprising a second editing template and a second PBS, wherein the second PBS comprises at its 5′ end sequence number 1221, and wherein (a) the first editing template comprises a region of complementarity to the second editing template, (b) the first editing template comprises nucleotides 5 to 14 of sequence number 1216 and the second editing template comprises nucleotides 5 to 14 of sequence number 2, or (c) the first editing template comprises nucleotides 5 to 14 of sequence number 1216 and a region of complementarity to the second editing template, and the second editing template comprises nucleotides 5 to 14 of sequence number 2 and a region of complementarity to the first editing template.

[0476] The 5′ PEgRNA spacer can be, for example, 17 to 22 nucleotides in length, and can comprise any one of sequence numbers 1-6. In some embodiments, the 5′ PEgRNA spacer comprises sequence number 1. In some embodiments, the 5′ PEgRNA spacer is 20 nucleotides in length. The PBS of the 5′ PEgRNA can be, for example, 5 to 19 nucleotides in length, and comprise any one of sequence numbers 7-21. In some embodiments, the PBS is 8 to 17 nucleotides in length. In some embodiments, the PBS is 8 to 16 nucleotides in length and comprises any one of sequence numbers 10 to 18. In some embodiments, the PBS is 10 to 12 nucleotides in length and comprises any one of sequence numbers 12 to 14. In some embodiments, the PBS is 10 or 12 nucleotides in length and comprises sequence 12 or 14, respectively.

[0477] The 3′ PEgRNA spacer can be, for example, 17 to 22 nucleotides in length, and can comprise any one of sequence numbers 1215-1220. In some embodiments, the 3′ PEgRNA spacer comprises sequence number 1215. In some embodiments, the 5′ PEgRNA spacer is 20 nucleotides in length. The PBS of the 5′ PEgRNA can be, for example, 5 to 19 nucleotides in length, and comprise any one of sequence numbers 1221-1235. In some embodiments, the PBS is 8 to 17 nucleotides in length. In some embodiments, the PBS is 8 to 16 nucleotides in length and comprises any one of sequence numbers 1224 to 1232. In some embodiments, the PBS is 10 to 12 nucleotides in length and comprises any one of sequence numbers 1226 to 1228. In some embodiments, the PBS is 10 or 12 nucleotides in length and comprises sequence 1226 or 1228, respectively.

[0478] In some embodiments, the dual prime editing composition comprises a 5′ PEgRNA having a spacer and a PBS provided in Table 1, and a 3′ PEgRNA having a spacer and a PBS provided in Table 29, wherein the RTT of the 5′ PEgRNA (the 5′ RTT) comprise a region of complementarity to the RTT of the 3′ PEgRNA (the 3′ RTT). The 5′ PEgRNA is capable of complexing with a prime editor comprising a Cas9 nickase (e.g. a Cas9 having an inactivated HNH nuclease domain) to generate a first nick, and the 3′ PEgRNA is capable of complexing with a prime editor comprising a Cas9 nickase (e.g. a Cas9 having an inactivated HNH nuclease domain) to generate a second nick on the FXN gene. Accordingly, contacting the target FXN gene with the dual prime editing system can result in deletion of the sequence between the first nick and the second nick (the deleted region referred to as the IND) that includes the GAA repeats and insertion of the replacement duplex (RD) encoded by the 5′ RTT and the 3′ RTT. Exemplary completely or partially complementary RTT pairs are provided in Table 56. Each pair of RTT1 and RTT2 that have the same RTT pairing number can be used as the 5′ RTT and the 3′ RTT, respectively, or vice versa. In some embodiments, the 5′ RTT comprises nucleotides 1 to x of SEQ ID NO: a, and the 3′ RTT comprises nucleotides 1 to y of SEQ ID NO: b, wherein x is an integer from 10 to i, i is the length of SEQ ID NO: a, y is an integer from (i+10−x) to i, a is an integer from 1972 to 2070 or from 2401 to 2414, and b is an integer that equals (a+99). In some embodiments, a is an integer from 1972 to 1991 or from 2401 to 2414. In some embodiments, the 3′ RTT comprises nucleotides 1 to x of SEQ ID NO: a, and the 5′ RTT comprises nucleotides 1 to y of SEQ ID NO: b, wherein x is an integer from 10 to i, i is the length of SEQ ID NO: a, y is an integer from (i+10−x) to i, a is an integer from 1972 to 2070 or from 2401 to 2414, and b is an integer that equals (a+99). In some embodiments, a is an integer from 1972 to 1991 or from 2401 to 2414. x can be any integer between 10 and i, for example, from 11, 12, 13, 14, 15, 16, 17, 18, 19, 20, 21, 22, 23, 24, 25, 26, 27, 28, 29 or 30 to i, provided that i is greater or equal to x. In some embodiments, a length of x of at least 15 nucleotides is chosen. In some embodiments, x is an integer from 17 to i. In some embodiments, x is an integer from 19 to i, from 20 to i, from 27 to i, from 28 to i, or from 29 to i. In some embodiments, when the 5′ RTT and the 3′ RTT are completely complementary to each other throughout their entire length, x equals y equals i. In some embodiments, a is 1972 and b is 2071. In some embodiments, a is 1979, 1982, 1985, 1986, or 1991.

[0479] Alternatively, in some embodiments, the dual prime editing composition can comprise the dual prime editing composition comprises a 5′ PEgRNA having a spacer and a PBS provided in Table 1, and a 3′ PEgRNA having a spacer and a PBS provided in Table 29, wherein the first editing template comprises nucleotides 5 to 14 of sequence number 1216 and the second editing template comprises nucleotides 5 to 14 of sequence number 2. The 5′ PEgRNA is capable of complexing with a prime editor comprising a Cas9 nickase (e.g. a Cas9 having an inactivated HNH nuclease domain) to generate a first nick, and the 3′ PEgRNA is capable of complexing with a prime editor comprising a Cas9 nickase (e.g. a Cas9 having an inactivated HNH nuclease domain) to generate a second nick in the FXN gene. Accordingly, the 5′ RTT comprises a region of complementarity to the endogenous FXN sequence directly downstream of the second nick (i.e. the endogenous FXN sequence directly downstream of nucleotide 3 of the search target sequence of the 3′ PEgRNA), and the 3′ RTT comprises a region of complementarity to the endogenous FXN sequence directly downstream of the first nick (i.e. the endogenous FXN sequence directly downstream of nucleotide 3 of the search target sequence of the 5′ PEgRNA). Contacting the target FXN gene with the dual prime editing system can result in deletion of the sequence between the first nick and the second nick (the deleted region referred to as the IND) that includes the GAA repeats without insertion of an exogenous sequence. In some embodiments, the region of complementarity of the 5′ RTT to the endogenous FXN sequence is at least about 15 nucleotides in length. In some embodiments, the region of complementarity of the 5′ RTT to the endogenous FXN sequence is at least about 20 nucleotides in length. In some embodiments, the region of complementarity of the 5′ RTT to the endogenous FXN sequence is at about 20 to 30 nucleotides in length. In some embodiments, the region of complementarity of the 5′ RTT to the endogenous FXN sequence is at about 20, about 25, or about 30 nucleotides in length. In some embodiments, the region of complementarity of the 3′ RTT to the endogenous FXN sequence is at least about 15 nucleotides in length. In some embodiments, the region of complementarity of the 3′ RTT to the endogenous FXN sequence is at least about 20 nucleotides in length. In some embodiments, the region of complementarity of the 3′ RTT to the endogenous FXN sequence is at about 20 to 30 nucleotides in length. In some embodiments, the region of complementarity of the 3′ RTT to the endogenous FXN sequence is at about 20, about 25, or about 30 nucleotides in length. In some embodiments, the 5′ RTT comprises nucleotides 21-30 of sequence number 2172. In some embodiments, the 5′ RTT comprises nucleotides 16-30 of sequence number 2172. In some embodiments, the 5′ RTT comprises sequence number 2170, 2171, or 2172.

[0480] Alternatively, in some embodiments, the dual prime editing composition can comprise the dual prime editing composition comprises a 5′ PEgRNA having a spacer and a PBS provided in Table 1, and a 3′ PEgRNA having a spacer and a PBS provided in Table 29, and wherein the first editing template comprises nucleotides 5 to 14 of sequence number 1216 and a region of complementarity to the second editing template, and the second editing template comprises nucleotides 5 to 14 of sequence number 2 and a region of complementarity to the first editing template. Contacting the target FXN gene with the dual prime editing system can result in deletion of the sequence between the first nick and the second nick (the deleted region referred to as the IND) that includes the GAA repeats and insertion of the overlapping duplex (OD) encoded by the 5′ RTT and the 3′ RTT.

[0481] The 5′ PEgRNA and the 3′ PEgRNA exemplified in Tables 1 and 29 can comprise, from 5′ to 3′, the spacer, the gRNA core, the editing template (RTT), and the PBS. The 3′ end of the RTT can be contiguous with the 5′ end of the PBS. The PEgRNA can comprise multiple RNA molecules or can be a single RNA molecule. Any PEgRNA exemplified in Tables 1 and 29 may comprise, or further comprise, a 3′ motif at the 3′ end of the extension arm, or adaptations used for transcription of the PEgRNA. In some embodiments, a 3′ motif that is capable of forming a tertiary structure on its own, such as a hairpin, a pseudoknot, or other RNA structure or motif is used. In some embodiments, the 3′ motif is connected to the 3′ end of the PBS via a linker sequence. In some embodiments, the 3′ motif comprises SEQ ID NO: 2237. Without being bound by theory, such 3′ motifs are believed to increase PEgRNA stability. PEgRNA sequences exemplified in Tables 1 and 29 may also be adapted for expression from a nucleic acid template with a U6 promoter, for example, by including a 5′ terminal G if the spacer of the PEgRNA begins with another nucleotide, by including an additional A at the 3′ end of the extension arm, and/or by including 6 or 7 U nucleotides at the 3′ end of the extension arm. The modifications included in the selection of full length 5′ PEgRNAs included in Tables 1 and 29 are annotated in column 3 (Description) of the tables.

[0482] The gRNA core sequence of the 5′ PEgRNA and the gRNA core of the 3′ PEgRNA can comprise a sequence selected from any one of SEQ ID NO: 2259-2260 and 2273-2281. It can be advantageous to select the same gRNA core sequence for both the 5′ PEgRNA and the 3′ PEgRNA, thus avoiding the need to use two different Cas9 proteins. If no specific SEQ ID NO is annotated for the gRNA core sequence, a canonical SpCas9 gRNA core sequence (SEQ ID NO: 2260) is used. Alternative gRNA core sequences used are annotated in column 3 of Tables 1 and 29. In some embodiments, the gRNA core of the 5′ PEgRNA and/or the 3′ PEgRNA comprise SEQ ID NO: 2260. In some embodiments, the gRNA core of the 5′ PEgRNA and/or the 3′ PEgRNA comprise SEQ ID NO: 2259.

[0483] Any 5′ PEgRNA and 3′ PEgRNA sequence provided in Tables 1 and 29 may be chemically synthesized and may alternatively or additionally comprise one or more chemical modifications, such as phosphorothioate (PS) bond(s), 2′-O-methylated (2′-Ome) nucleotides, or a combination thereof. In some embodiments, the 5′ PEgRNA and/or the 3′ PEgRNA comprises 3′ mN*mN*mN*N and 5′mN*mN*mN* modifications, where m indicates that the nucleotide contains a 2′-O-Me modification and a * indicates the presence of a phosphorothioate bond.

[0484] In some embodiments, the dual prime editing composition comprises a 5′ PEgRNA and a 3′ PEgRNA, wherein the 5′ PEgRNA comprises sequence number 22, 23, 24, 25, 66, 67, 68, 69, 70, 71, 72, 73, 74, 75, 76, 77, 78, 79, 80, 81, 82, 83, 84, 85, 86, 87, 88, 89, 90, 91, 92, 93, 94, 95, 96, 98, 99, or 100, and wherein the 3′ PEgRNA comprises sequence number 1236, 1237, 1238, 1239, 1292, 1293, 1294, 1295, 1296, 1297, 1298, 1299, 1300, 1301, 1302, 1303, 1304, 1305, 1306, 1307, 1308, 1309, 1310, 1311, 1312, 1313, 1314, 1315, 1316, 1317, 1318, 1319, 1320, 1321, 1322, or 1323.

[0485] In some embodiments, the dual prime editing composition comprises a 5′ PEgRNA and a 3′ PEgRNA, wherein the 5′ PEgRNA comprises sequence number 22, 23, 24, 25, 73, 98, 99, or 100, and wherein the 3′ PEgRNA comprises sequence number 1236, 1237, 1238, 1239, 1308, 1309, 1310, 1311, 1312, 1313, 1314, 1315, 1316, 1317, 1318, 1319, 1320, or 1321.

[0486] In some embodiments, the dual prime editing composition comprises a 5′ PEgRNA and a 3′ PEgRNA, wherein the 5′ PEgRNA comprises sequence number 26 or 27, and wherein the 3′ PEgRNA comprises sequence number 1240 or 1241. In some embodiments, the dual prime editing composition comprises a 5′ PEgRNA and a 3′ PEgRNA, wherein the 5′ PEgRNA comprises sequence number 28 or 29, and wherein the 3′ PEgRNA comprises sequence number 1242 or 1243. In some embodiments, the dual prime editing composition comprises a 5′ PEgRNA and a 3′ PEgRNA, wherein the 5′ PEgRNA comprises sequence number 30 or 31, and wherein the 3′ PEgRNA comprises sequence number 1244 or 1245. In some embodiments, the dual prime editing composition comprises a 5′ PEgRNA and a 3′ PEgRNA, wherein the 5′ PEgRNA comprises sequence number 32 or 33, and wherein the 3′ PEgRNA comprises sequence number 1246 or 1247. In some embodiments, the dual prime editing composition comprises a 5′ PEgRNA and a 3′ PEgRNA, wherein the 5′ PEgRNA comprises sequence number 34 or 35, and wherein the 3′ PEgRNA comprises sequence number 1248 or 1249. In some embodiments, the dual prime editing composition comprises a 5′ PEgRNA and a 3′ PEgRNA, wherein the 5′ PEgRNA comprises sequence number 36 or 37, and wherein the 3′ PEgRNA comprises sequence number 1250 or 1251. In some embodiments, the dual prime editing composition comprises a 5′ PEgRNA and a 3′ PEgRNA, wherein the 5′ PEgRNA comprises sequence number 38 or 39, and wherein the 3′ PEgRNA comprises sequence number 1252 or 1253. In some embodiments, the dual prime editing composition comprises a 5′ PEgRNA and a 3′ PEgRNA, wherein the 5′ PEgRNA comprises sequence number 40 or 41, and wherein the 3′ PEgRNA comprises sequence number 1254 or 1255. In some embodiments, the dual prime editing composition comprises a 5′ PEgRNA and a 3′ PEgRNA, wherein the 5′ PEgRNA comprises sequence number 42 or 43, and wherein the 3′ PEgRNA comprises sequence number 1256 or 1257. In some embodiments, the dual prime editing composition comprises a 5′ PEgRNA and a 3′ PEgRNA, wherein the 5′ PEgRNA comprises sequence number 44 or 45, and wherein the 3′ PEgRNA comprises sequence number 1258 or 1259. In some embodiments, the dual prime editing composition comprises a 5′ PEgRNA and a 3′ PEgRNA, wherein the 5′ PEgRNA comprises sequence number 46 or 47, and wherein the 3′ PEgRNA comprises sequence number 1260 or 1261. In some embodiments, the dual prime editing composition comprises a 5′ PEgRNA and a 3′ PEgRNA, wherein the 5′ PEgRNA comprises sequence number 48 or 49, and wherein the 3′ PEgRNA comprises sequence number 1262 or 1263. In some embodiments, the dual prime editing composition comprises a 5′ PEgRNA and a 3′ PEgRNA, wherein the 5′ PEgRNA comprises sequence number 50 or 51, and wherein the 3′ PEgRNA comprises sequence number 1264 or 1265. In some embodiments, the dual prime editing composition comprises a 5′ PEgRNA and a 3′ PEgRNA, wherein the 5′ PEgRNA comprises sequence number 52 or 53, and wherein the 3′ PEgRNA comprises sequence number 1266 or 1267. In some embodiments, the dual prime editing composition comprises a 5′ PEgRNA and a 3′ PEgRNA, wherein the 5′ PEgRNA comprises sequence number 54 or 55, and wherein the 3′ PEgRNA comprises sequence number 1268 or 1269. In some embodiments, the dual prime editing composition comprises a 5′ PEgRNA and a 3′ PEgRNA, wherein the 5′ PEgRNA comprises sequence number 56 or 57, and wherein the 3′ PEgRNA comprises sequence number 1270 or 1271. In some embodiments, the dual prime editing composition comprises a 5′ PEgRNA and a 3′ PEgRNA, wherein the 5′ PEgRNA comprises sequence number 58 or 59, and wherein the 3′ PEgRNA comprises sequence number 1272 or 1273. In some embodiments, the dual prime editing composition comprises a 5′ PEgRNA and a 3′ PEgRNA, wherein the 5′ PEgRNA comprises sequence number 60 or 61, and wherein the 3′ PEgRNA comprises sequence number 1274 or 1275. In some embodiments, the dual prime editing composition comprises a 5′ PEgRNA and a 3′ PEgRNA, wherein the 5′ PEgRNA comprises sequence number 62 or 63, and wherein the 3′ PEgRNA comprises sequence number 1276 or 1277. In some embodiments, the dual prime editing composition comprises a 5′ PEgRNA and a 3′ PEgRNA, wherein the 5′ PEgRNA comprises sequence number 64 or 65, and wherein the 3′ PEgRNA comprises sequence number 1278 or 1279. Contacting the target FXN gene with the dual prime editing system can result in deletion of the sequence between the first nick and the second nick (the deleted region referred to as the IND) that includes the GAA repeats and insertion of the replacement duplex (RD) encoded by the 5′ RTT and the 3′ RTT.

[0487] In some embodiments, a dual prime editing composition for editing of the GAA repeat expansion in the FXN gene can comprise a 5′ PEgRNA having a spacer and a PBS provided in Table 2, and a 3′ PEgRNA having a spacer and a PBS provided in Table 14. The dual prime editing composition can comprise (A) a 5′ PEgRNA (also referred to as a first PEgRNA) and a (B) 3′ PEgRNA (also referred to as a second PEgRNA), wherein the first PEgRNA comprises (i) a first spacer that comprises at its 3′ end sequence number 102; (ii) a first gRNA core capable of binding to a Cas9 protein; and (iii) a first extension arm comprising a first editing template and a first primer binding site (PBS), wherein the first PBS comprises at its 5′ end sequence number 107; wherein the second PEgRNA comprises (i) a second spacer that comprises at its 3′ end sequence number 632; (ii) a second gRNA core capable of binding to a Cas9 protein; and (iii) a second extension arm comprising a second editing template and a second PBS, wherein the second PBS comprises at its 5′ end sequence number 637, and wherein (a) the first editing template comprises a region of complementarity to the second editing template, (b) the first editing template comprises nucleotides 5 to 14 of sequence number 632 and the second editing template comprises nucleotides 5 to 14 of sequence number 102, or (c) the first editing template comprises nucleotides 5 to 14 of sequence number 632 and a region of complementarity to the second editing template, and the second editing template comprises nucleotides 5 to 14 of sequence number 102 and a region of complementarity to the first editing template.

[0488] The 5′ PEgRNA spacer can be, for example, 17 to 22 nucleotides in length, and can comprise any one of sequence numbers 101-106. In some embodiments, the 5′ PEgRNA spacer comprises sequence number 101. In some embodiments, the 5′ PEgRNA spacer is 20 nucleotides in length. The PBS of the 5′ PEgRNA can be, for example, 5 to 19 nucleotides in length, and comprise any one of sequence numbers 107-121. In some embodiments, the PBS is 8 to 17 nucleotides in length. In some embodiments, the PBS is 8 to 16 nucleotides in length and comprises any one of sequence numbers 110 to 118. In some embodiments, the PBS is 10 to 12 nucleotides in length and comprises any one of sequence numbers 112 to 114. In some embodiments, the PBS is 10 or 12 nucleotides in length and comprises sequence 112 or 114, respectively.

[0489] The 3′ PEgRNA spacer can be, for example, 17 to 22 nucleotides in length, and can comprise any one of sequence numbers 631-636. In some embodiments, the 3′ PEgRNA spacer comprises sequence number 631. In some embodiments, the 5′ PEgRNA spacer is 20 nucleotides in length. The PBS of the 5′ PEgRNA can be, for example, 5 to 19 nucleotides in length, and comprise any one of sequence numbers 637-651. In some embodiments, the PBS is 8 to 17 nucleotides in length. In some embodiments, the PBS is 8 to 16 nucleotides in length and comprises any one of sequence numbers 640 to 648. In some embodiments, the PBS is 10 to 12 nucleotides in length and comprises any one of sequence numbers 642 to 644. In some embodiments, the PBS is 10 or 12 nucleotides in length and comprises sequence 642 or 644, respectively.

[0490] In some embodiments, the dual prime editing composition comprises a 5′ PEgRNA having a spacer and a PBS provided in Table 2, and a 3′ PEgRNA having a spacer and a PBS provided in Table 14, wherein the RTT of the 5′ PEgRNA (the 5′ RTT) comprise a region of complementarity to the RTT of the 3′ PEgRNA (the 3′ RTT). The 5′ PEgRNA is capable of complexing with a prime editor comprising a Cas9 nickase (e.g. a Cas9 having an inactivated HNH nuclease domain) to generate a first nick, and the 3′ PEgRNA is capable of complexing with a prime editor comprising a Cas9 nickase (e.g. a Cas9 having an inactivated HNH nuclease domain) to generate a second nick on the FXN gene. Accordingly, contacting the target FXN gene with the dual prime editing system can result in deletion of the sequence between the first nick and the second nick (the deleted region referred to as the IND) that includes the GAA repeats and insertion of the replacement duplex (RD) encoded by the 5′ RTT and the 3′ RTT. Exemplary completely or partially complementary RTT pairs are provided in Table 56. Each pair of RTT1 and RTT2 that have the same RTT pairing number can be used as the 5′ RTT and the 3′ RTT, respectively, or vice versa. In some embodiments, the 5′ RTT comprises nucleotides 1 to x of SEQ ID NO: a, and the 3′ RTT comprises nucleotides 1 to y of SEQ ID NO: b, wherein x is an integer from 10 to i, i is the length of SEQ ID NO: a, y is an integer from (i+10−x) to i, a is an integer from 1972 to 2070 or from 2401 to 2414, and b is an integer that equals (a+99). In some embodiments, a is an integer from 1972 to 1991 or from 2401 to 2414. In some embodiments, the 3′ RTT comprises nucleotides 1 to x of SEQ ID NO: a, and the 5′ RTT comprises nucleotides 1 to y of SEQ ID NO: b, wherein x is an integer from 10 to i, i is the length of SEQ ID NO: a, y is an integer from (i+10−x) to i, a is an integer from 1972 to 2070 or from 2401 to 2414, and b is an integer that equals (a+99). In some embodiments, a is an integer from 1972 to 1991 or from 2401 to 2414. x can be any integer between 10 and i, for example, from 11, 12, 13, 14, 15, 16, 17, 18, 19, 20, 21, 22, 23, 24, 25, 26, 27, 28, 29 or 30 to i, provided that i is greater or equal to x. In some embodiments, a length of x of at least 15 nucleotides is chosen. In some embodiments, x is an integer from 17 to i. In some embodiments, x is an integer from 19 to i, from 20 to i, from 27 to i, from 28 to i, or from 29 to i. In some embodiments, when the 5′ RTT and the 3′ RTT are completely complementary to each other throughout their entire length, x equals y equals i. In some embodiments, a is 1972 and b is 2071. In some embodiments, a is 1979, 1982, 1985, 1986, or 1991.

[0491] Alternatively, in some embodiments, the dual prime editing composition can comprise the dual prime editing composition comprises a 5′ PEgRNA having a spacer and a PBS provided in Table 2, and a 3′ PEgRNA having a spacer and a PBS provided in Table 14, wherein the first editing template comprises nucleotides 5 to 14 of sequence number 632 and the second editing template comprises nucleotides 5 to 14 of sequence number 102. The 5′ PEgRNA is capable of complexing with a prime editor comprising a Cas9 nickase (e.g. a Cas9 having an inactivated HNH nuclease domain) to generate a first nick, and the 3′ PEgRNA is capable of complexing with a prime editor comprising a Cas9 nickase (e.g. a Cas9 having an inactivated HNH nuclease domain) to generate a second nick in the FXN gene. Accordingly, the 5′ RTT comprises a region of complementarity to the endogenous FXN sequence directly downstream of the second nick (i.e. the endogenous FXN sequence directly downstream of nucleotide 3 of the search target sequence of the 3′ PEgRNA), and the 3′ RTT comprises a region of complementarity to the endogenous FXN sequence directly downstream of the first nick (i.e. the endogenous FXN sequence directly downstream of nucleotide 3 of the search target sequence of the 5′ PEgRNA). Contacting the target FXN gene with the dual prime editing system can result in deletion of the sequence between the first nick and the second nick (the deleted region referred to as the IND) that includes the GAA repeats without insertion of an exogenous sequence. In some embodiments, the region of complementarity of the 5′ RTT to the endogenous FXN sequence is at least about 15 nucleotides in length. In some embodiments, the region of complementarity of the 5′ RTT to the endogenous FXN sequence is at least about 20 nucleotides in length. In some embodiments, the region of complementarity of the 5′ RTT to the endogenous FXN sequence is at about 20 to 30 nucleotides in length. In some embodiments, the region of complementarity of the 5′ RTT to the endogenous FXN sequence is at about 20, about 25, or about 30 nucleotides in length. In some embodiments, the region of complementarity of the 3′ RTT to the endogenous FXN sequence is at least about 15 nucleotides in length. In some embodiments, the region of complementarity of the 3′ RTT to the endogenous FXN sequence is at least about 20 nucleotides in length. In some embodiments, the region of complementarity of the 3′ RTT to the endogenous FXN sequence is at about 20 to 30 nucleotides in length. In some embodiments, the region of complementarity of the 3′ RTT to the endogenous FXN sequence is at about 20, about 25, or about 30 nucleotides in length. In some embodiments, the 5′ RTT comprises nucleotides 21-30 of sequence number 2172. In some embodiments, the 5′ RTT comprises nucleotides 16-30 of sequence number 2172. In some embodiments, the 5′ RTT comprises sequence number 2170, 2171, or 2172. In some embodiments, the 3′ RTT comprises nucleotides 21-30 of sequence number 2181. In some embodiments, the 3′ RTT comprises nucleotides 16-30 of sequence number 2181. In some embodiments, the 3′ RTT comprises sequence number 2179, 2180, or 2181.

[0492] Alternatively, in some embodiments, the dual prime editing composition can comprise the dual prime editing composition comprises a 5′ PEgRNA having a spacer and a PBS provided in Table 2, and a 3′ PEgRNA having a spacer and a PBS provided in Table 14, and wherein the first editing template comprises nucleotides 5 to 14 of sequence number 632 and a region of complementarity to the second editing template, and the second editing template comprises nucleotides 5 to 14 of sequence number 102 and a region of complementarity to the first editing template. Contacting the target FXN gene with the dual prime editing system can result in deletion of the sequence between the first nick and the second nick (the deleted region referred to as the IND) that includes the GAA repeats and insertion of the overlapping duplex (OD) encoded by the 5′ RTT and the 3′ RTT.

[0493] The 5′ PEgRNA and the 3′ PEgRNA exemplified in Tables 2 and 14 can comprise, from 5′ to 3′, the spacer, the gRNA core, the editing template (RTT), and the PBS. The 3′ end of the RTT can be contiguous with the 5′ end of the PBS. The PEgRNA can comprise multiple RNA molecules or can be a single RNA molecule. Any PEgRNA exemplified in Tables 2 and 14 may comprise, or further comprise, a 3′ motif at the 3′ end of the extension arm, or adaptations used for transcription of the PEgRNA. In some embodiments, a 3′ motif that is capable of forming a tertiary structure on its own, such as a hairpin, a pseudoknot, or other RNA structure or motif is used. In some embodiments, the 3′ motif is connected to the 3′ end of the PBS via a linker sequence. In some embodiments, the 3′ motif comprises SEQ ID NO: 2237. Without being bound by theory, such 3′ motifs are believed to increase PEgRNA stability. PEgRNA sequences exemplified in Tables 2 and 14 may also be adapted for expression from a nucleic acid template with a U6 promoter, for example, by including a 5′ terminal G if the spacer of the PEgRNA begins with another nucleotide, by including an additional A at the 3′ end of the extension arm, and/or by including 6 or 7 U nucleotides at the 3′ end of the extension arm. The modifications included in the selection of full length 5′ PEgRNAs included in Tables 2 and 14 are annotated in column 3 (Description) of the tables.

[0494] The gRNA core sequence of the 5′ PEgRNA and the gRNA core of the 3′ PEgRNA can comprise a sequence selected from any one of SEQ ID NO: 2259-2260 and 2273-2281. It can be advantageous to select the same gRNA core sequence for both the 5′ PEgRNA and the 3′ PEgRNA, thus avoiding the need to use two different Cas9 proteins. If no specific SEQ ID NO is annotated for the gRNA core sequence, a canonical SpCas9 gRNA core sequence (SEQ ID NO: 2260) is used. Alternative gRNA core sequences used are annotated in column 3 of Tables 2 and 14. In some embodiments, the gRNA core of the 5′ PEgRNA and/or the 3′ PEgRNA comprise SEQ ID NO: 2260. In some embodiments, the gRNA core of the 5′ PEgRNA and/or the 3′ PEgRNA comprise SEQ ID NO: 2259.

[0495] Any 5′ PEgRNA and 3′ PEgRNA sequence provided in Tables 2 and 14 may be chemically synthesized and may alternatively or additionally comprise one or more chemical modifications, such as phosphorothioate (PS) bond(s), 2′-O-methylated (2′-Ome) nucleotides, or a combination thereof. In some embodiments, the 5′ PEgRNA and/or the 3′ PEgRNA comprises 3′ mN*mN*mN*N and 5′mN*mN*mN* modifications, where m indicates that the nucleotide contains a 2′-O-Me modification and a * indicates the presence of a phosphorothioate bond.

[0496] In some embodiments, the dual prime editing composition comprises a 5′ PEgRNA and a 3′ PEgRNA, wherein the 5′ PEgRNA comprises sequence number 122, 123, 124, 125, 202, 203, 204, 205, 206, 207, 208, 209, 210, 211, 212, 213, 214, 215, 216, 217, 218, 219, 220, 221, 222, 223, 224, 225, 226, 227, 228, 229, 230, 231, 232, or 233, and wherein the 3′ PEgRNA comprises sequence number 652, 653, 654, 655, 708, 709, 710, 711, 712, 713, 714, 715, 716, 717, 718, 719, 720, 721, 722, 723, 724, 725, 726, 727, 728, 729, 730, 731, 732, 733, 734, 735, 736, 737, 738, or 739.

[0497] In some embodiments, the dual prime editing composition comprises a 5′ PEgRNA and a 3′ PEgRNA, wherein the 5′ PEgRNA comprises sequence number 122, 123, 124, 125, 218, 219, 220, 221, 222, 223, 224, 225, 226, 227, 228, 229, 230, 231, 232, or 233, and wherein the 3′ PEgRNA comprises sequence number 652, 653, 654, 655, 724, 725, 726, 727, 728, 729, 730, 731, 732, 733, 734, 735, 736, 737, 738, or 739. In some embodiments, the dual prime editing composition comprises a 5′ PEgRNA and a 3′ PEgRNA, wherein the 5′ PEgRNA comprises sequence number 126 or 127, and wherein the 3′ PEgRNA comprises sequence number 656 or 657. In some embodiments, the dual prime editing composition comprises a 5′ PEgRNA and a 3′ PEgRNA, wherein the 5′ PEgRNA comprises sequence number 128 or 129, and wherein the 3′ PEgRNA comprises sequence number 658 or 659. In some embodiments, the dual prime editing composition comprises a 5′ PEgRNA and a 3′ PEgRNA, wherein the 5′ PEgRNA comprises sequence number 130 or 131, and wherein the 3′ PEgRNA comprises sequence number 660 or 661. In some embodiments, the dual prime editing composition comprises a 5′ PEgRNA and a 3′ PEgRNA, wherein the 5′ PEgRNA comprises sequence number 132 or 133, and wherein the 3′ PEgRNA comprises sequence number 662 or 663. In some embodiments, the dual prime editing composition comprises a 5′ PEgRNA and a 3′ PEgRNA, wherein the 5′ PEgRNA comprises sequence number 134 or 135, and wherein the 3′ PEgRNA comprises sequence number 664 or 665. In some embodiments, the dual prime editing composition comprises a 5′ PEgRNA and a 3′ PEgRNA, wherein the 5′ PEgRNA comprises sequence number 136 or 137, and wherein the 3′ PEgRNA comprises sequence number 666 or 667. In some embodiments, the dual prime editing composition comprises a 5′ PEgRNA and a 3′ PEgRNA, wherein the 5′ PEgRNA comprises sequence number 138 or 139, and wherein the 3′ PEgRNA comprises sequence number 668 or 669. In some embodiments, the dual prime editing composition comprises a 5′ PEgRNA and a 3′ PEgRNA, wherein the 5′ PEgRNA comprises sequence number 140 or 141, and wherein the 3′ PEgRNA comprises sequence number 670 or 671. In some embodiments, the dual prime editing composition comprises a 5′ PEgRNA and a 3′ PEgRNA, wherein the 5′ PEgRNA comprises sequence number 142 or 143, and wherein the 3′ PEgRNA comprises sequence number 672 or 673. In some embodiments, the dual prime editing composition comprises a 5′ PEgRNA and a 3′ PEgRNA, wherein the 5′ PEgRNA comprises sequence number 144 or 145, and wherein the 3′ PEgRNA comprises sequence number 674 or 675. In some embodiments, the dual prime editing composition comprises a 5′ PEgRNA and a 3′ PEgRNA, wherein the 5′ PEgRNA comprises sequence number 146 or 147, and wherein the 3′ PEgRNA comprises sequence number 676 or 677. In some embodiments, the dual prime editing composition comprises a 5′ PEgRNA and a 3′ PEgRNA, wherein the 5′ PEgRNA comprises sequence number 148 or 149, and wherein the 3′ PEgRNA comprises sequence number 678 or 679. In some embodiments, the dual prime editing composition comprises a 5′ PEgRNA and a 3′ PEgRNA, wherein the 5′ PEgRNA comprises sequence number 150 or 151, and wherein the 3′ PEgRNA comprises sequence number 680 or 681. In some embodiments, the dual prime editing composition comprises a 5′ PEgRNA and a 3′ PEgRNA, wherein the 5′ PEgRNA comprises sequence number 152 or 153, and wherein the 3′ PEgRNA comprises sequence number 682 or 683. In some embodiments, the dual prime editing composition comprises a 5′ PEgRNA and a 3′ PEgRNA, wherein the 5′ PEgRNA comprises sequence number 154 or 155, and wherein the 3′ PEgRNA comprises sequence number 684 or 685. In some embodiments, the dual prime editing composition comprises a 5′ PEgRNA and a 3′ PEgRNA, wherein the 5′ PEgRNA comprises sequence number 156 or 157, and wherein the 3′ PEgRNA comprises sequence number 686 or 687. In some embodiments, the dual prime editing composition comprises a 5′ PEgRNA and a 3′ PEgRNA, wherein the 5′ PEgRNA comprises sequence number 158 or 159, and wherein the 3′ PEgRNA comprises sequence number 688 or 689. In some embodiments, the dual prime editing composition comprises a 5′ PEgRNA and a 3′ PEgRNA, wherein the 5′ PEgRNA comprises sequence number 160 or 161, and wherein the 3′ PEgRNA comprises sequence number 690 or 691. In some embodiments, the dual prime editing composition comprises a 5′ PEgRNA and a 3′ PEgRNA, wherein the 5′ PEgRNA comprises sequence number 162 or 163, and wherein the 3′ PEgRNA comprises sequence number 692 or 693. In some embodiments, the dual prime editing composition comprises a 5′ PEgRNA and a 3′ PEgRNA, wherein the 5′ PEgRNA comprises sequence number 164 or 165, and wherein the 3′ PEgRNA comprises sequence number 694 or 695. In some embodiments, the dual prime editing composition comprises a 5′ PEgRNA and a 3′ PEgRNA, wherein the 5′ PEgRNA comprises sequence number 2522 or 2528, and wherein the 3′ PEgRNA comprises sequence number 2544. In some embodiments, the dual prime editing composition comprises a 5′ PEgRNA and a 3′ PEgRNA, wherein the 5′ PEgRNA comprises sequence number 2523 or 2529, and wherein the 3′ PEgRNA comprises sequence number 2545 or 2548. Contacting the target FXN gene with the dual prime editing system can result in deletion of the sequence between the first nick and the second nick (the deleted region referred to as the IND) that includes the GAA repeats and insertion of the replacement duplex (RD) encoded by the 5′ RTT and the 3′ RTT.

[0498] In some embodiments, the dual prime editing composition comprises a 5′ PEgRNA and a 3′ PEgRNA, wherein the 5′ PEgRNA comprises sequence number 166, 167, 168, 169, 170, 171, 172, 173, 174, 175, 176, 177, and wherein the 3′ PEgRNA comprises sequence number 696, 698, 700, 702, 704, or 706. Contacting the target FXN gene with the dual prime editing system can result in deletion of the sequence between the first nick and the second nick (the deleted region referred to as the IND) that includes the GAA repeats without insertion of an exogenous sequence.

[0499] In some embodiments, a dual prime editing composition for editing of the GAA repeat expansion in the FXN gene can comprise a 5′ PEgRNA having a spacer and a PBS provided in Table 2, and a 3′ PEgRNA having a spacer and a PBS provided in Table 25. The dual prime editing composition can comprise (A) a 5′ PEgRNA (also referred to as a first PEgRNA) and a (B) 3′ PEgRNA (also referred to as a second PEgRNA), wherein the first PEgRNA comprises (i) a first spacer that comprises at its 3′ end sequence number 102; (ii) a first gRNA core capable of binding to a Cas9 protein; and (iii) a first extension arm comprising a first editing template and a first primer binding site (PBS), wherein the first PBS comprises at its 5′ end sequence number 107; wherein the second PEgRNA comprises (i) a second spacer that comprises at its 3′ end sequence number 1018; (ii) a second gRNA core capable of binding to a Cas9 protein; and (iii) a second extension arm comprising a second editing template and a second PBS, wherein the second PBS comprises at its 5′ end sequence number 1023, and wherein (a) the first editing template comprises a region of complementarity to the second editing template, (b) the first editing template comprises nucleotides 5 to 14 of sequence number 1018 and the second editing template comprises nucleotides 5 to 14 of sequence number 102, or (c) the first editing template comprises nucleotides 5 to 14 of sequence number 1018 and a region of complementarity to the second editing template, and the second editing template comprises nucleotides 5 to 14 of sequence number 102 and a region of complementarity to the first editing template.

[0500] The 5′ PEgRNA spacer can be, for example, 17 to 22 nucleotides in length, and can comprise any one of sequence numbers 101-106. In some embodiments, the 5′ PEgRNA spacer comprises sequence number 101. In some embodiments, the 5′ PEgRNA spacer is 20 nucleotides in length. The PBS of the 5′ PEgRNA can be, for example, 5 to 19 nucleotides in length, and comprise any one of sequence numbers 107-121. In some embodiments, the PBS is 8 to 17 nucleotides in length. In some embodiments, the PBS is 8 to 16 nucleotides in length and comprises any one of sequence numbers 110 to 118. In some embodiments, the PBS is 10 to 12 nucleotides in length and comprises any one of sequence numbers 112 to 114. In some embodiments, the PBS is 10 or 12 nucleotides in length and comprises sequence 112 or 114, respectively.

[0501] The 3′ PEgRNA spacer can be, for example, 17 to 22 nucleotides in length, and can comprise any one of sequence numbers 1017-1022. In some embodiments, the 3′ PEgRNA spacer comprises sequence number 1017. In some embodiments, the 5′ PEgRNA spacer is 20 nucleotides in length. The PBS of the 5′ PEgRNA can be, for example, 5 to 19 nucleotides in length, and comprise any one of sequence numbers 1023-1037. In some embodiments, the PBS is 8 to 17 nucleotides in length. In some embodiments, the PBS is 8 to 16 nucleotides in length and comprises any one of sequence numbers 1026 to 1034. In some embodiments, the PBS is 10 to 12 nucleotides in length and comprises any one of sequence numbers 1028 to 1030. In some embodiments, the PBS is 10 or 12 nucleotides in length and comprises sequence 1928 or 1030, respectively.

[0502] In some embodiments, the dual prime editing composition comprises a 5′ PEgRNA having a spacer and a PBS provided in Table 2, and a 3′ PEgRNA having a spacer and a PBS provided in Table 25, wherein the RTT of the 5′ PEgRNA (the 5′ RTT) comprise a region of complementarity to the RTT of the 3′ PEgRNA (the 3′ RTT). The 5′ PEgRNA is capable of complexing with a prime editor comprising a Cas9 nickase (e.g. a Cas9 having an inactivated HNH nuclease domain) to generate a first nick, and the 3′ PEgRNA is capable of complexing with a prime editor comprising a Cas9 nickase (e.g. a Cas9 having an inactivated HNH nuclease domain) to generate a second nick on the FXN gene. Accordingly, contacting the target FXN gene with the dual prime editing system can result in deletion of the sequence between the first nick and the second nick (the deleted region referred to as the IND) that includes the GAA repeats and insertion of the replacement duplex (RD) encoded by the 5′ RTT and the 3′ RTT. Exemplary completely or partially complementary RTT pairs are provided in Table 56. Each pair of RTT1 and RTT2 that have the same RTT pairing number can be used as the 5′ RTT and the 3′ RTT, respectively, or vice versa. In some embodiments, the 5′ RTT comprises nucleotides 1 to x of SEQ ID NO: a, and the 3′ RTT comprises nucleotides 1 to y of SEQ ID NO: b, wherein x is an integer from 10 to i, i is the length of SEQ ID NO: a, y is an integer from (i+10−x) to i, a is an integer from 1972 to 2070 or from 2401 to 2414, and b is an integer that equals (a+99). In some embodiments, a is an integer from 1972 to 1991 or from 2401 to 2414. In some embodiments, the 3′ RTT comprises nucleotides 1 to x of SEQ ID NO: a, and the 5′ RTT comprises nucleotides 1 to y of SEQ ID NO: b, wherein x is an integer from 10 to i, i is the length of SEQ ID NO: a, y is an integer from (i+10−x) to i, a is an integer from 1972 to 2070 or from 2401 to 2414, and b is an integer that equals (a+99). In some embodiments, a is an integer from 1972 to 1991 or from 2401 to 2414. x can be any integer between 10 and i, for example, from 11, 12, 13, 14, 15, 16, 17, 18, 19, 20, 21, 22, 23, 24, 25, 26, 27, 28, 29 or 30 to i, provided that i is greater or equal to x. In some embodiments, a length of x of at least 15 nucleotides is chosen. In some embodiments, x is an integer from 17 to i. In some embodiments, x is an integer from 19 to i, from 20 to i, from 27 to i, from 28 to i, or from 29 to i. In some embodiments, when the 5′ RTT and the 3′ RTT are completely complementary to each other throughout their entire length, x equals y equals i. In some embodiments, a is 1972 and b is 2071. In some embodiments, a is 1979, 1982, 1985, 1986, or 1991.

[0503] Alternatively, in some embodiments, the dual prime editing composition can comprise the dual prime editing composition comprises a 5′ PEgRNA having a spacer and a PBS provided in Table 2, and a 3′ PEgRNA having a spacer and a PBS provided in Table 25, wherein the first editing template comprises nucleotides 5 to 14 of sequence number 1018 and the second editing template comprises nucleotides 5 to 14 of sequence number 102. The 5′ PEgRNA is capable of complexing with a prime editor comprising a Cas9 nickase (e.g. a Cas9 having an inactivated HNH nuclease domain) to generate a first nick, and the 3′ PEgRNA is capable of complexing with a prime editor comprising a Cas9 nickase (e.g. a Cas9 having an inactivated HNH nuclease domain) to generate a second nick in the FXN gene. Accordingly, the 5′ RTT comprises a region of complementarity to the endogenous FXN sequence directly downstream of the second nick (i.e. the endogenous FXN sequence directly downstream of nucleotide 3 of the search target sequence of the 3′ PEgRNA), and the 3′ RTT comprises a region of complementarity to the endogenous FXN sequence directly downstream of the first nick (i.e. the endogenous FXN sequence directly downstream of nucleotide 3 of the search target sequence of the 5′ PEgRNA). Contacting the target FXN gene with the dual prime editing system can result in deletion of the sequence between the first nick and the second nick (the deleted region referred to as the IND) that includes the GAA repeats without insertion of an exogenous sequence. In some embodiments, the region of complementarity of the 5′ RTT to the endogenous FXN sequence is at least about 15 nucleotides in length. In some embodiments, the region of complementarity of the 5′ RTT to the endogenous FXN sequence is at least about 20 nucleotides in length. In some embodiments, the region of complementarity of the 5′ RTT to the endogenous FXN sequence is at about 20 to 30 nucleotides in length. In some embodiments, the region of complementarity of the 5′ RTT to the endogenous FXN sequence is at about 20, about 25, or about 30 nucleotides in length. In some embodiments, the region of complementarity of the 3′ RTT to the endogenous FXN sequence is at least about 15 nucleotides in length. In some embodiments, the region of complementarity of the 3′ RTT to the endogenous FXN sequence is at least about 20 nucleotides in length. In some embodiments, the region of complementarity of the 3′ RTT to the endogenous FXN sequence is at about 20 to 30 nucleotides in length. In some embodiments, the region of complementarity of the 3′ RTT to the endogenous FXN sequence is at about 20, about 25, or about 30 nucleotides in length. In some embodiments, the 5′ RTT comprises nucleotides 21-30 of sequence number 2175. In some embodiments, the 5′ RTT comprises nucleotides 16-30 of sequence number 2175. In some embodiments, the 5′ RTT comprises sequence number 2173, 2174, or 2175. In some embodiments, the 3′ RTT comprises nucleotides 21-30 of sequence number 2181. In some embodiments, the 3′ RTT comprises nucleotides 16-30 of sequence number 2181. In some embodiments, the 3′ RTT comprises sequence number 2179, 2180, or 2181.

[0504] Alternatively, in some embodiments, the dual prime editing composition can comprise the dual prime editing composition comprises a 5′ PEgRNA having a spacer and a PBS provided in Table 2, and a 3′ PEgRNA having a spacer and a PBS provided in Table 25, and wherein the first editing template comprises nucleotides 5 to 14 of sequence number 1018 and a region of complementarity to the second editing template, and the second editing template comprises nucleotides 5 to 14 of sequence number 102 and a region of complementarity to the first editing template. Contacting the target FXN gene with the dual prime editing system can result in deletion of the sequence between the first nick and the second nick (the deleted region referred to as the IND) that includes the GAA repeats and insertion of the overlapping duplex (OD) encoded by the 5′ RTT and the 3′ RTT.

[0505] The 5′ PEgRNA and the 3′ PEgRNA exemplified in Tables 2 and 25 can comprise, from 5′ to 3′, the spacer, the gRNA core, the editing template (RTT), and the PBS. The 3′ end of the RTT can be contiguous with the 5′ end of the PBS. The PEgRNA can comprise multiple RNA molecules or can be a single RNA molecule. Any PEgRNA exemplified in Tables 2 and 25 may comprise, or further comprise, a 3′ motif at the 3′ end of the extension arm, or adaptations used for transcription of the PEgRNA. In some embodiments, a 3′ motif that is capable of forming a tertiary structure on its own, such as a hairpin, a pseudoknot, or other RNA structure or motif is used. In some embodiments, the 3′ motif is connected to the 3′ end of the PBS via a linker sequence. In some embodiments, the 3′ motif comprises SEQ ID NO: 2237. Without being bound by theory, such 3′ motifs are believed to increase PEgRNA stability. PEgRNA sequences exemplified in Tables 2 and 25 may also be adapted for expression from a nucleic acid template with a U6 promoter, for example, by including a 5′ terminal G if the spacer of the PEgRNA begins with another nucleotide, by including an additional A at the 3′ end of the extension arm, and/or by including 6 or 7 U nucleotides at the 3′ end of the extension arm. The modifications included in the selection of full length 5′ PEgRNAs included in Tables 2 and 25 are annotated in column 3 (Description) of the tables.

[0506] The gRNA core sequence of the 5′ PEgRNA and the gRNA core of the 3′ PEgRNA can comprise a sequence selected from any one of SEQ ID NO: 2259-2260 and 2273-2281. It can be advantageous to select the same gRNA core sequence for both the 5′ PEgRNA and the 3′ PEgRNA, thus avoiding the need to use two different Cas9 proteins. If no specific SEQ ID NO is annotated for the gRNA core sequence, a canonical SpCas9 gRNA core sequence (SEQ ID NO: 2260) is used. Alternative gRNA core sequences used are annotated in column 3 of Tables 2 and 25. In some embodiments, the gRNA core of the 5′ PEgRNA and/or the 3′ PEgRNA comprise SEQ ID NO: 2260. In some embodiments, the gRNA core of the 5′ PEgRNA and/or the 3′ PEgRNA comprise SEQ ID NO: 2259.

[0507] Any 5′ PEgRNA and 3′ PEgRNA sequence provided in Tables 2 and 25 may be chemically synthesized and may alternatively or additionally comprise one or more chemical modifications, such as phosphorothioate (PS) bond(s), 2′-O-methylated (2′-Ome) nucleotides, or a combination thereof. In some embodiments, the 5′ PEgRNA and/or the 3′ PEgRNA comprises 3′ mN*mN*mN*N and 5′mN*mN*mN* modifications, where m indicates that the nucleotide contains a 2′-O-Me modification and a * indicates the presence of a phosphorothioate bond.

[0508] In some embodiments, the dual prime editing composition comprises a 5′ PEgRNA and a 3′ PEgRNA, wherein the 5′ PEgRNA comprises sequence number 122, 123, 124, 125, 202, 203, 204, 205, 206, 207, 208, 209, 210, 211, 212, 213, 214, 215, 216, 217, 218, 219, 220, 221, 222, 223, 224, 225, 226, 227, 228, 229, 230, 231, 232, or 233, and wherein the 3′ PEgRNA comprises sequence number 1038, 1039, 1040, 1041, 1094, 1095, 1096, 1097, 1098, 1099, 1100, 1101, 1102, 1103, 1104, 1105, 1106, 1107, 1108, 1109, 1110, 1111, 1112, 1113, 1114, 1115, 1116, 1117, 1118, 1119, 1120, 1121, 1122, 1123, 1124, 1125, 1128, 1129, 1130, or 1131.

[0509] In some embodiments, the dual prime editing composition comprises a 5′ PEgRNA and a 3′ PEgRNA, wherein the 5′ PEgRNA comprises sequence number 122, 123, 124, 125, 218, 219, 220, 221, 222, 223, 224, 225, 226, 227, 228, 229, 230, 231, 232, or 233, and wherein the 3′ PEgRNA comprises sequence number 1038, 1039, 1040, 1041, 1098, or 1101.

[0510] In some embodiments, the dual prime editing composition comprises a 5′ PEgRNA and a 3′ PEgRNA, wherein the 5′ PEgRNA comprises sequence number 126 or 127, and wherein the 3′ PEgRNA comprises sequence number 1042 or 1043. In some embodiments, the dual prime editing composition comprises a 5′ PEgRNA and a 3′ PEgRNA, wherein the 5′ PEgRNA comprises sequence number 128 or 129, and wherein the 3′ PEgRNA comprises sequence number 1044 or 1045. In some embodiments, the dual prime editing composition comprises a 5′ PEgRNA and a 3′ PEgRNA, wherein the 5′ PEgRNA comprises sequence number 130 or 131, and wherein the 3′ PEgRNA comprises sequence number 1046 or 1047. In some embodiments, the dual prime editing composition comprises a 5′ PEgRNA and a 3′ PEgRNA, wherein the 5′ PEgRNA comprises sequence number 132 or 133, and wherein the 3′ PEgRNA comprises sequence number 1048 or 1049. In some embodiments, the dual prime editing composition comprises a 5′ PEgRNA and a 3′ PEgRNA, wherein the 5′ PEgRNA comprises sequence number 134 or 135, and wherein the 3′ PEgRNA comprises sequence number 1050 or 1051. In some embodiments, the dual prime editing composition comprises a 5′ PEgRNA and a 3′ PEgRNA, wherein the 5′ PEgRNA comprises sequence number 136 or 137, and wherein the 3′ PEgRNA comprises sequence number 1052 or 1053. In some embodiments, the dual prime editing composition comprises a 5′ PEgRNA and a 3′ PEgRNA, wherein the 5′ PEgRNA comprises sequence number 138 or 139, and wherein the 3′ PEgRNA comprises sequence number 1054 or 1055. In some embodiments, the dual prime editing composition comprises a 5′ PEgRNA and a 3′ PEgRNA, wherein the 5′ PEgRNA comprises sequence number 140 or 141, and wherein the 3′ PEgRNA comprises sequence number 1056 or 1057. In some embodiments, the dual prime editing composition comprises a 5′ PEgRNA and a 3′ PEgRNA, wherein the 5′ PEgRNA comprises sequence number 142 or 143, and wherein the 3′ PEgRNA comprises sequence number 1058 or 1059. In some embodiments, the dual prime editing composition comprises a 5′ PEgRNA and a 3′ PEgRNA, wherein the 5′ PEgRNA comprises sequence number 144 or 145, and wherein the 3′ PEgRNA comprises sequence number 1060 or 1061. In some embodiments, the dual prime editing composition comprises a 5′ PEgRNA and a 3′ PEgRNA, wherein the 5′ PEgRNA comprises sequence number 146 or 147, and wherein the 3′ PEgRNA comprises sequence number 1062 or 1063. In some embodiments, the dual prime editing composition comprises a 5′ PEgRNA and a 3′ PEgRNA, wherein the 5′ PEgRNA comprises sequence number 148 or 149, and wherein the 3′ PEgRNA comprises sequence number 1064 or 1065. In some embodiments, the dual prime editing composition comprises a 5′ PEgRNA and a 3′ PEgRNA, wherein the 5′ PEgRNA comprises sequence number 150 or 151, and wherein the 3′ PEgRNA comprises sequence number 1066 or 1067. In some embodiments, the dual prime editing composition comprises a 5′ PEgRNA and a 3′ PEgRNA, wherein the 5′ PEgRNA comprises sequence number 152 or 153, and wherein the 3′ PEgRNA comprises sequence number 1068 or 1069. In some embodiments, the dual prime editing composition comprises a 5′ PEgRNA and a 3′ PEgRNA, wherein the 5′ PEgRNA comprises sequence number 154 or 155, and wherein the 3′ PEgRNA comprises sequence number 1070 or 1071. In some embodiments, the dual prime editing composition comprises a 5′ PEgRNA and a 3′ PEgRNA, wherein the 5′ PEgRNA comprises sequence number 156 or 157, and wherein the 3′ PEgRNA comprises sequence number 1072 or 1073. In some embodiments, the dual prime editing composition comprises a 5′ PEgRNA and a 3′ PEgRNA, wherein the 5′ PEgRNA comprises sequence number 158 or 159, and wherein the 3′ PEgRNA comprises sequence number 1074 or 1075. In some embodiments, the dual prime editing composition comprises a 5′ PEgRNA and a 3′ PEgRNA, wherein the 5′ PEgRNA comprises sequence number 160 or 161, and wherein the 3′ PEgRNA comprises sequence number 1076 or 1077. In some embodiments, the dual prime editing composition comprises a 5′ PEgRNA and a 3′ PEgRNA, wherein the 5′ PEgRNA comprises sequence number 162 or 163, and wherein the 3′ PEgRNA comprises sequence number 1078 or 1079. In some embodiments, the dual prime editing composition comprises a 5′ PEgRNA and a 3′ PEgRNA, wherein the 5′ PEgRNA comprises sequence number 164 or 165, and wherein the 3′ PEgRNA comprises sequence number 1080 or 1081. In some embodiments, the dual prime editing composition comprises a 5′ PEgRNA and a 3′ PEgRNA, wherein the 5′ PEgRNA comprises sequence number 2524 or 2530, and wherein the 3′ PEgRNA comprises sequence number 2551 or 2557. In some embodiments, the dual prime editing composition comprises a 5′ PEgRNA and a 3′ PEgRNA, wherein the 5′ PEgRNA comprises sequence number 2525 or 2531, and wherein the 3′ PEgRNA comprises sequence number 2552 or 2558. Contacting the target FXN gene with the dual prime editing system can result in deletion of the sequence between the first nick and the second nick (the deleted region referred to as the IND) that includes the GAA repeats and insertion of the replacement duplex (RD) encoded by the 5′ RTT and the 3′ RTT.

[0511] In some embodiments, the dual prime editing composition comprises a 5′ PEgRNA and a 3′ PEgRNA, wherein the 5′ PEgRNA comprises sequence number 178, 179, 180, 181, 182, 183, 184, 185, 186, 187, 188, 189, and wherein the 3′ PEgRNA comprises sequence number 1082, 1083, 1084, 1085, 1086, 1087, 1088, 1089, 1090, 1091, 1092, 1093. Contacting the target FXN gene with the dual prime editing system can result in deletion of the sequence between the first nick and the second nick (the deleted region referred to as the IND) that includes the GAA repeats without insertion of an exogenous sequence.

[0512] In some embodiments, a dual prime editing composition for editing of the GAA repeat expansion in the FXN gene can comprise a 5′ PEgRNA having a spacer and a PBS provided in Table 2, and a 3′ PEgRNA having a spacer and a PBS provided in Table 29. The dual prime editing composition can comprise (A) a 5′ PEgRNA (also referred to as a first PEgRNA) and a (B) 3′ PEgRNA (also referred to as a second PEgRNA), wherein the first PEgRNA comprises (i) a first spacer that comprises at its 3′ end sequence number 102; (ii) a first gRNA core capable of binding to a Cas9 protein; and (iii) a first extension arm comprising a first editing template and a first primer binding site (PBS), wherein the first PBS comprises at its 5′ end sequence number 107; wherein the second PEgRNA comprises (i) a second spacer that comprises at its 3′ end sequence number 1216; (ii) a second gRNA core capable of binding to a Cas9 protein; and (iii) a second extension arm comprising a second editing template and a second PBS, wherein the second PBS comprises at its 5′ end sequence number 1221, and wherein (a) the first editing template comprises a region of complementarity to the second editing template, (b) the first editing template comprises nucleotides 5 to 14 of sequence number 1216 and the second editing template comprises nucleotides 5 to 14 of sequence number 102, or (c) the first editing template comprises nucleotides 5 to 14 of sequence number 1216 and a region of complementarity to the second editing template, and the second editing template comprises nucleotides 5 to 14 of sequence number 102 and a region of complementarity to the first editing template.

[0513] The 5′ PEgRNA spacer can be, for example, 17 to 22 nucleotides in length, and can comprise any one of sequence numbers 101-106. In some embodiments, the 5′ PEgRNA spacer comprises sequence number 101. In some embodiments, the 5′ PEgRNA spacer is 20 nucleotides in length. The PBS of the 5′ PEgRNA can be, for example, 5 to 19 nucleotides in length, and comprise any one of sequence numbers 107-121. In some embodiments, the PBS is 8 to 17 nucleotides in length. In some embodiments, the PBS is 8 to 16 nucleotides in length and comprises any one of sequence numbers 110 to 118. In some embodiments, the PBS is 10 to 12 nucleotides in length and comprises any one of sequence numbers 112 to 114. In some embodiments, the PBS is 10 or 12 nucleotides in length and comprises sequence 112 or 114, respectively.

[0514] The 3′ PEgRNA spacer can be, for example, 17 to 22 nucleotides in length, and can comprise any one of sequence numbers 1215-1220. In some embodiments, the 3′ PEgRNA spacer comprises sequence number 1215. In some embodiments, the 5′ PEgRNA spacer is 20 nucleotides in length. The PBS of the 5′ PEgRNA can be, for example, 5 to 19 nucleotides in length, and comprise any one of sequence numbers 1221-1235. In some embodiments, the PBS is 8 to 17 nucleotides in length. In some embodiments, the PBS is 8 to 16 nucleotides in length and comprises any one of sequence numbers 1224 to 1232. In some embodiments, the PBS is 10 to 12 nucleotides in length and comprises any one of sequence numbers 1226 to 1228. In some embodiments, the PBS is 10 or 12 nucleotides in length and comprises sequence 1226 or 1228, respectively.

[0515] In some embodiments, the dual prime editing composition comprises a 5′ PEgRNA having a spacer and a PBS provided in Table 2, and a 3′ PEgRNA having a spacer and a PBS provided in Table 29, wherein the RTT of the 5′ PEgRNA (the 5′ RTT) comprise a region of complementarity to the RTT of the 3′ PEgRNA (the 3′ RTT). The 5′ PEgRNA is capable of complexing with a prime editor comprising a Cas9 nickase (e.g. a Cas9 having an inactivated HNH nuclease domain) to generate a first nick, and the 3′ PEgRNA is capable of complexing with a prime editor comprising a Cas9 nickase (e.g. a Cas9 having an inactivated HNH nuclease domain) to generate a second nick on the FXN gene. Accordingly, contacting the target FXN gene with the dual prime editing system can result in deletion of the sequence between the first nick and the second nick (the deleted region referred to as the IND) that includes the GAA repeats and insertion of the replacement duplex (RD) encoded by the 5′ RTT and the 3′ RTT. Exemplary completely or partially complementary RTT pairs are provided in Table 56. Each pair of RTT1 and RTT2 that have the same RTT pairing number can be used as the 5′ RTT and the 3′ RTT, respectively, or vice versa. In some embodiments, the 5′ RTT comprises nucleotides 1 to x of SEQ ID NO: a, and the 3′ RTT comprises nucleotides 1 to y of SEQ ID NO: b, wherein x is an integer from 10 to i, i is the length of SEQ ID NO: a, y is an integer from (i+10−x) to i, a is an integer from 1972 to 2070 or from 2401 to 2414, and b is an integer that equals (a+99). In some embodiments, a is an integer from 1972 to 1991 or from 2401 to 2414. In some embodiments, the 3′ RTT comprises nucleotides 1 to x of SEQ ID NO: a, and the 5′ RTT comprises nucleotides 1 to y of SEQ ID NO: b, wherein x is an integer from 10 to i, i is the length of SEQ ID NO: a, y is an integer from (i+10−x) to i, a is an integer from 1972 to 2070 or from 2401 to 2414, and b is an integer that equals (a+99). In some embodiments, a is an integer from 1972 to 1991 or from 2401 to 2414. x can be any integer between 10 and i, for example, from 11, 12, 13, 14, 15, 16, 17, 18, 19, 20, 21, 22, 23, 24, 25, 26, 27, 28, 29 or 30 to i, provided that i is greater or equal to x. In some embodiments, a length of x of at least 15 nucleotides is chosen. In some embodiments, x is an integer from 17 to i. In some embodiments, x is an integer from 19 to i, from 20 to i, from 27 to i, from 28 to i, or from 29 to i. In some embodiments, when the 5′ RTT and the 3′ RTT are completely complementary to each other throughout their entire length, x equals y equals i. In some embodiments, a is 1972 and b is 2071. In some embodiments, a is 1979, 1982, 1985, 1986, or 1991.

[0516] Alternatively, in some embodiments, the dual prime editing composition can comprise the dual prime editing composition comprises a 5′ PEgRNA having a spacer and a PBS provided in Table 2, and a 3′ PEgRNA having a spacer and a PBS provided in Table 29, wherein the first editing template comprises nucleotides 5 to 14 of sequence number 1216 and the second editing template comprises nucleotides 5 to 14 of sequence number 102. The 5′ PEgRNA is capable of complexing with a prime editor comprising a Cas9 nickase (e.g. a Cas9 having an inactivated HNH nuclease domain) to generate a first nick, and the 3′ PEgRNA is capable of complexing with a prime editor comprising a Cas9 nickase (e.g. a Cas9 having an inactivated HNH nuclease domain) to generate a second nick in the FXN gene. Accordingly, the 5′ RTT comprises a region of complementarity to the endogenous FXN sequence directly downstream of the second nick (i.e. the endogenous FXN sequence directly downstream of nucleotide 3 of the search target sequence of the 3′ PEgRNA), and the 3′ RTT comprises a region of complementarity to the endogenous FXN sequence directly downstream of the first nick (i.e. the endogenous FXN sequence directly downstream of nucleotide 3 of the search target sequence of the 5′ PEgRNA). Contacting the target FXN gene with the dual prime editing system can result in deletion of the sequence between the first nick and the second nick (the deleted region referred to as the IND) that includes the GAA repeats without insertion of an exogenous sequence. In some embodiments, the region of complementarity of the 5′ RTT to the endogenous FXN sequence is at least about 15 nucleotides in length. In some embodiments, the region of complementarity of the 5′ RTT to the endogenous FXN sequence is at least about 20 nucleotides in length. In some embodiments, the region of complementarity of the 5′ RTT to the endogenous FXN sequence is at about 20 to 30 nucleotides in length. In some embodiments, the region of complementarity of the 5′ RTT to the endogenous FXN sequence is at about 20, about 25, or about 30 nucleotides in length. In some embodiments, the region of complementarity of the 3′ RTT to the endogenous FXN sequence is at least about 15 nucleotides in length. In some embodiments, the region of complementarity of the 3′ RTT to the endogenous FXN sequence is at least about 20 nucleotides in length. In some embodiments, the region of complementarity of the 3′ RTT to the endogenous FXN sequence is at about 20 to 30 nucleotides in length. In some embodiments, the region of complementarity of the 3′ RTT to the endogenous FXN sequence is at about 20, about 25, or about 30 nucleotides in length. In some embodiments, the 5′ RTT comprises nucleotides 21-30 of sequence number 2178. In some embodiments, the 5′ RTT comprises nucleotides 16-30 of sequence number 2178. In some embodiments, the 5′ RTT comprises sequence number 2176, 2177, or 2178. In some embodiments, the 3′ RTT comprises nucleotides 21-30 of sequence number 2181. In some embodiments, the 3′ RTT comprises nucleotides 16-30 of sequence number 2181. In some embodiments, the 3′ RTT comprises sequence number 2179, 2180, or 2181.

[0517] Alternatively, in some embodiments, the dual prime editing composition can comprise the dual prime editing composition comprises a 5′ PEgRNA having a spacer and a PBS provided in Table 2, and a 3′ PEgRNA having a spacer and a PBS provided in Table 29, and wherein the first editing template comprises nucleotides 5 to 14 of sequence number 1216 and a region of complementarity to the second editing template, and the second editing template comprises nucleotides 5 to 14 of sequence number 102 and a region of complementarity to the first editing template. Contacting the target FXN gene with the dual prime editing system can result in deletion of the sequence between the first nick and the second nick (the deleted region referred to as the IND) that includes the GAA repeats and insertion of the overlapping duplex (OD) encoded by the 5′ RTT and the 3′ RTT.

[0518] The 5′ PEgRNA and the 3′ PEgRNA exemplified in Tables 2 and 29 can comprise, from 5′ to 3′, the spacer, the gRNA core, the editing template (RTT), and the PBS. The 3′ end of the RTT can be contiguous with the 5′ end of the PBS. The PEgRNA can comprise multiple RNA molecules or can be a single RNA molecule. Any PEgRNA exemplified in Tables 2 and 29 may comprise, or further comprise, a 3′ motif at the 3′ end of the extension arm, or adaptations used for transcription of the PEgRNA. In some embodiments, a 3′ motif that is capable of forming a tertiary structure on its own, such as a hairpin, a pseudoknot, or other RNA structure or motif is used. In some embodiments, the 3′ motif is connected to the 3′ end of the PBS via a linker sequence. In some embodiments, the 3′ motif comprises SEQ ID NO: 2237. Without being bound by theory, such 3′ motifs are believed to increase PEgRNA stability. PEgRNA sequences exemplified in Tables 2 and 29 may also be adapted for expression from a nucleic acid template with a U6 promoter, for example, by including a 5′ terminal G if the spacer of the PEgRNA begins with another nucleotide, by including an additional A at the 3′ end of the extension arm, and/or by including 6 or 7 U nucleotides at the 3′ end of the extension arm. The modifications included in the selection of full length 5′ PEgRNAs included in Tables 2 and 29 are annotated in column 3 (Description) of the tables.

[0519] The gRNA core sequence of the 5′ PEgRNA and the gRNA core of the 3′ PEgRNA can comprise a sequence selected from any one of SEQ ID NO: 2259-2260 and 2273-2281. It can be advantageous to select the same gRNA core sequence for both the 5′ PEgRNA and the 3′ PEgRNA, thus avoiding the need to use two different Cas9 proteins. If no specific SEQ ID NO is annotated for the gRNA core sequence, a canonical SpCas9 gRNA core sequence (SEQ ID NO: 2260) is used. Alternative gRNA core sequences used are annotated in column 3 of Tables 2 and 29. In some embodiments, the gRNA core of the 5′ PEgRNA and/or the 3′ PEgRNA comprise SEQ ID NO: 2260. In some embodiments, the gRNA core of the 5′ PEgRNA and/or the 3′ PEgRNA comprise SEQ ID NO: 2259.

[0520] Any 5′ PEgRNA and 3′ PEgRNA sequence provided in Tables 2 and 29 may be chemically synthesized and may alternatively or additionally comprise one or more chemical modifications, such as phosphorothioate (PS) bond(s), 2′-O-methylated (2′-Ome) nucleotides, or a combination thereof. In some embodiments, the 5′ PEgRNA and/or the 3′ PEgRNA comprises 3′ mN*mN*mN*N and 5′mN*mN*mN* modifications, where m indicates that the nucleotide contains a 2′-O-Me modification and a * indicates the presence of a phosphorothioate bond.

[0521] In some embodiments, the dual prime editing composition comprises a 5′ PEgRNA and a 3′ PEgRNA, wherein the 5′ PEgRNA comprises sequence number 122, 123, 124, 125, 202, 203, 204, 205, 206, 207, 208, 209, 210, 211, 212, 213, 214, 215, 216, 217, 218, 219, 220, 221, 222, 223, 224, 225, 226, 227, 228, 229, 230, 231, 232, or 233, and wherein the 3′ PEgRNA comprises sequence number 1236, 1237, 1238, 1239, 1292, 1293, 1294, 1295, 1296, 1297, 1298, 1299, 1300, 1301, 1302, 1303, 1304, 1305, 1306, 1307, 1308, 1309, 1310, 1311, 1312, 1313, 1314, 1315, 1316, 1317, 1318, 1319, 1320, 1321, 1322, or 1323.

[0522] In some embodiments, the dual prime editing composition comprises a 5′ PEgRNA and a 3′ PEgRNA, wherein the 5′ PEgRNA comprises sequence number 122, 123, 124, 125, 218, 219, 220, 221, 222, 223, 224, 225, 226, 227, 228, 229, 230, 231, 232, or 233, and wherein the 3′ PEgRNA comprises sequence number 1236, 1237, 1238, 1239, 1308, 1309, 1310, 1311, 1312, 1313, 1314, 1315, 1316, 1317, 1318, 1319, 1320, or 1321.

[0523] In some embodiments, the dual prime editing composition comprises a 5′ PEgRNA and a 3′ PEgRNA, wherein the 5′ PEgRNA comprises sequence number 126 or 127, and wherein the 3′ PEgRNA comprises sequence number 1240 or 1241. In some embodiments, the dual prime editing composition comprises a 5′ PEgRNA and a 3′ PEgRNA, wherein the 5′ PEgRNA comprises sequence number 128 or 129, and wherein the 3′ PEgRNA comprises sequence number 1242 or 1243. In some embodiments, the dual prime editing composition comprises a 5′ PEgRNA and a 3′ PEgRNA, wherein the 5′ PEgRNA comprises sequence number 130 or 131, and wherein the 3′ PEgRNA comprises sequence number 1244 or 1245. In some embodiments, the dual prime editing composition comprises a 5′ PEgRNA and a 3′ PEgRNA, wherein the 5′ PEgRNA comprises sequence number 132 or 133, and wherein the 3′ PEgRNA comprises sequence number 1246 or 247. In some embodiments, the dual prime editing composition comprises a 5′ PEgRNA and a 3′ PEgRNA, wherein the 5′ PEgRNA comprises sequence number 134 or 135, and wherein the 3′ PEgRNA comprises sequence number 1248 or 1249. In some embodiments, the dual prime editing composition comprises a 5′ PEgRNA and a 3′ PEgRNA, wherein the 5′ PEgRNA comprises sequence number 136 or 137, and wherein the 3′ PEgRNA comprises sequence number 1250 or 1251. In some embodiments, the dual prime editing composition comprises a 5′ PEgRNA and a 3′ PEgRNA, wherein the 5′ PEgRNA comprises sequence number 138 or 139, and wherein the 3′ PEgRNA comprises sequence number 1252 or 1253. In some embodiments, the dual prime editing composition comprises a 5′ PEgRNA and a 3′ PEgRNA, wherein the 5′ PEgRNA comprises sequence number 140 or 141, and wherein the 3′ PEgRNA comprises sequence number 1254 or 1255. In some embodiments, the dual prime editing composition comprises a 5′ PEgRNA and a 3′ PEgRNA, wherein the 5′ PEgRNA comprises sequence number 142 or 143, and wherein the 3′ PEgRNA comprises sequence number 1256 or 1257. In some embodiments, the dual prime editing composition comprises a 5′ PEgRNA and a 3′ PEgRNA, wherein the 5′ PEgRNA comprises sequence number 144 or 145, and wherein the 3′ PEgRNA comprises sequence number 1258 or 1259. In some embodiments, the dual prime editing composition comprises a 5′ PEgRNA and a 3′ PEgRNA, wherein the 5′ PEgRNA comprises sequence number 146 or 147, and wherein the 3′ PEgRNA comprises sequence number 1260 or 1261. In some embodiments, the dual prime editing composition comprises a 5′ PEgRNA and a 3′ PEgRNA, wherein the 5′ PEgRNA comprises sequence number 148 or 149, and wherein the 3′ PEgRNA comprises sequence number 1262 or 1263. In some embodiments, the dual prime editing composition comprises a 5′ PEgRNA and a 3′ PEgRNA, wherein the 5′ PEgRNA comprises sequence number 150 or 151, and wherein the 3′ PEgRNA comprises sequence number 1264 or 1265. In some embodiments, the dual prime editing composition comprises a 5′ PEgRNA and a 3′ PEgRNA, wherein the 5′ PEgRNA comprises sequence number 152 or 153, and wherein the 3′ PEgRNA comprises sequence number 1266 or 1267. In some embodiments, the dual prime editing composition comprises a 5′ PEgRNA and a 3′ PEgRNA, wherein the 5′ PEgRNA comprises sequence number 154 or 155, and wherein the 3′ PEgRNA comprises sequence number 1268 or 1269. In some embodiments, the dual prime editing composition comprises a 5′ PEgRNA and a 3′ PEgRNA, wherein the 5′ PEgRNA comprises sequence number 156 or 157, and wherein the 3′ PEgRNA comprises sequence number 1270 or 1271. In some embodiments, the dual prime editing composition comprises a 5′ PEgRNA and a 3′ PEgRNA, wherein the 5′ PEgRNA comprises sequence number 158 or 159, and wherein the 3′ PEgRNA comprises sequence number 1272 or 1273. In some embodiments, the dual prime editing composition comprises a 5′ PEgRNA and a 3′ PEgRNA, wherein the 5′ PEgRNA comprises sequence number 160 or 161, and wherein the 3′ PEgRNA comprises sequence number 1274 or 1275. In some embodiments, the dual prime editing composition comprises a 5′ PEgRNA and a 3′ PEgRNA, wherein the 5′ PEgRNA comprises sequence number 162 or 163, and wherein the 3′ PEgRNA comprises sequence number 1276 or 1277. In some embodiments, the dual prime editing composition comprises a 5′ PEgRNA and a 3′ PEgRNA, wherein the 5′ PEgRNA comprises sequence number 164 or 165, and wherein the 3′ PEgRNA comprises sequence number 1278 or 1279. In some embodiments, the dual prime editing composition comprises a 5′ PEgRNA and a 3′ PEgRNA, wherein the 5′ PEgRNA comprises sequence number 2526 or 2532, and wherein the 3′ PEgRNA comprises sequence number 2561 or 2565. In some embodiments, the dual prime editing composition comprises a 5′ PEgRNA and a 3′ PEgRNA, wherein the 5′ PEgRNA comprises sequence number 2527 or 2533, and wherein the 3′ PEgRNA comprises sequence number 2562 or 2566. Contacting the target FXN gene with the dual prime editing system can result in deletion of the sequence between the first nick and the second nick (the deleted region referred to as the IND) that includes the GAA repeats and insertion of the replacement duplex (RD) encoded by the 5′ RTT and the 3′ RTT.

[0524] In some embodiments, the dual prime editing composition comprises a 5′ PEgRNA and a 3′ PEgRNA, wherein the 5′ PEgRNA comprises sequence number 190, 191, 192, 193, 194, 195, 196, 197, 198, 199, 200, or 201, and wherein the 3′ PEgRNA comprises sequence number 1280, 1281, 1282, 1283, 1284, 1285, 1286, 1287, 1288, 1289, 1290, or 1291. Contacting the target FXN gene with the dual prime editing system can result in deletion of the sequence between the first nick and the second nick (the deleted region referred to as the IND) that includes the GAA repeats without insertion of an exogenous sequence.

[0525] In some embodiments, a dual prime editing composition for editing of the GAA repeat expansion in the FXN gene can comprise a 5′ PEgRNA having a spacer and a PBS provided in Table 3, and a 3′ PEgRNA having a spacer and a PBS provided in Table 14. The dual prime editing composition can comprise (A) a 5′ PEgRNA (also referred to as a first PEgRNA) and a (B) 3′ PEgRNA (also referred to as a second PEgRNA), wherein the first PEgRNA comprises (i) a first spacer that comprises at its 3′ end sequence number 235; (ii) a first gRNA core capable of binding to a Cas9 protein; and (iii) a first extension arm comprising a first editing template and a first primer binding site (PBS), wherein the first PBS comprises at its 5′ end sequence number 240; wherein the second PEgRNA comprises (i) a second spacer that comprises at its 3′ end sequence number 632; (ii) a second gRNA core capable of binding to a Cas9 protein; and (iii) a second extension arm comprising a second editing template and a second PBS, wherein the second PBS comprises at its 5′ end sequence number 637, and wherein (a) the first editing template comprises a region of complementarity to the second editing template, (b) the first editing template comprises nucleotides 5 to 14 of sequence number 632 and the second editing template comprises nucleotides 5 to 14 of sequence number 235, or (c) the first editing template comprises nucleotides 5 to 14 of sequence number 632 and a region of complementarity to the second editing template, and the second editing template comprises nucleotides 5 to 14 of sequence number 235 and a region of complementarity to the first editing template.

[0526] The 5′ PEgRNA spacer can be, for example, 17 to 22 nucleotides in length, and can comprise any one of sequence numbers 234-239. In some embodiments, the 5′ PEgRNA spacer comprises sequence number 234. In some embodiments, the 5′ PEgRNA spacer is 20 nucleotides in length. The PBS of the 5′ PEgRNA can be, for example, 5 to 19 nucleotides in length, and comprise any one of sequence numbers 240-254. In some embodiments, the PBS is 8 to 17 nucleotides in length. In some embodiments, the PBS is 8 to 16 nucleotides in length and comprises any one of sequence numbers 243 to 251. In some embodiments, the PBS is 10 to 12 nucleotides in length and comprises any one of sequence numbers 245 to 247. In some embodiments, the PBS is 10 or 12 nucleotides in length and comprises sequence 245 or 247, respectively.

[0527] The 3′ PEgRNA spacer can be, for example, 17 to 22 nucleotides in length, and can comprise any one of sequence numbers 631-636. In some embodiments, the 3′ PEgRNA spacer comprises sequence number 631. In some embodiments, the 5′ PEgRNA spacer is 20 nucleotides in length. The PBS of the 5′ PEgRNA can be, for example, 5 to 19 nucleotides in length, and comprise any one of sequence numbers 637-651. In some embodiments, the PBS is 8 to 17 nucleotides in length. In some embodiments, the PBS is 8 to 16 nucleotides in length and comprises any one of sequence numbers 640 to 648. In some embodiments, the PBS is 10 to 12 nucleotides in length and comprises any one of sequence numbers 642 to 644. In some embodiments, the PBS is 10 or 12 nucleotides in length and comprises sequence 642 or 644, respectively.

[0528] In some embodiments, the dual prime editing composition comprises a 5′ PEgRNA having a spacer and a PBS provided in Table 3, and a 3′ PEgRNA having a spacer and a PBS provided in Table 14, wherein the RTT of the 5′ PEgRNA (the 5′ RTT) comprise a region of complementarity to the RTT of the 3′ PEgRNA (the 3′ RTT). The 5′ PEgRNA is capable of complexing with a prime editor comprising a Cas9 nickase (e.g. a Cas9 having an inactivated HNH nuclease domain) to generate a first nick, and the 3′ PEgRNA is capable of complexing with a prime editor comprising a Cas9 nickase (e.g. a Cas9 having an inactivated HNH nuclease domain) to generate a second nick on the FXN gene. Accordingly, contacting the target FXN gene with the dual prime editing system can result in deletion of the sequence between the first nick and the second nick (the deleted region referred to as the IND) that includes the GAA repeats and insertion of the replacement duplex (RD) encoded by the 5′ RTT and the 3′ RTT. Exemplary completely or partially complementary RTT pairs are provided in Table 56. Each pair of RTT1 and RTT2 that have the same RTT pairing number can be used as the 5′ RTT and the 3′ RTT, respectively, or vice versa. In some embodiments, the 5′ RTT comprises nucleotides 1 to x of SEQ ID NO: a, and the 3′ RTT comprises nucleotides 1 to y of SEQ ID NO: b, wherein x is an integer from 10 to i, i is the length of SEQ ID NO: a, y is an integer from (i+10−x) to i, a is an integer from 1972 to 2070 or from 2401 to 2414, and b is an integer that equals (a+99). In some embodiments, a is an integer from 1972 to 1991 or from 2401 to 2414. In some embodiments, the 3′ RTT comprises nucleotides 1 to x of SEQ ID NO: a, and the 5′ RTT comprises nucleotides 1 to y of SEQ ID NO: b, wherein x is an integer from 10 to i, i is the length of SEQ ID NO: a, y is an integer from (i+10−x) to i, a is an integer from 1972 to 2070 or from 2401 to 2414, and b is an integer that equals (a+99). In some embodiments, a is an integer from 1972 to 1991 or from 2401 to 2414. x can be any integer between 10 and i, for example, from 11, 12, 13, 14, 15, 16, 17, 18, 19, 20, 21, 22, 23, 24, 25, 26, 27, 28, 29 or 30 to i, provided that i is greater or equal to x. In some embodiments, a length of x of at least 15 nucleotides is chosen. In some embodiments, x is an integer from 17 to i. In some embodiments, x is an integer from 19 to i, from 20 to i, from 27 to i, from 28 to i, or from 29 to i. In some embodiments, when the 5′ RTT and the 3′ RTT are completely complementary to each other throughout their entire length, x equals y equals i. In some embodiments, a is 1972 and b is 2071. In some embodiments, a is 1979, 1982, 1985, 1986, or 1991.

[0529] Alternatively, in some embodiments, the dual prime editing composition can comprise the dual prime editing composition comprises a 5′ PEgRNA having a spacer and a PBS provided in Table 3, and a 3′ PEgRNA having a spacer and a PBS provided in Table 14, wherein the first editing template comprises nucleotides 5 to 14 of sequence number 632 and the second editing template comprises nucleotides 5 to 14 of sequence number 235. The 5′ PEgRNA is capable of complexing with a prime editor comprising a Cas9 nickase (e.g. a Cas9 having an inactivated HNH nuclease domain) to generate a first nick, and the 3′ PEgRNA is capable of complexing with a prime editor comprising a Cas9 nickase (e.g. a Cas9 having an inactivated HNH nuclease domain) to generate a second nick in the FXN gene. Accordingly, the 5′ RTT comprises a region of complementarity to the endogenous FXN sequence directly downstream of the second nick (i.e. the endogenous FXN sequence directly downstream of nucleotide 3 of the search target sequence of the 3′ PEgRNA), and the 3′ RTT comprises a region of complementarity to the endogenous FXN sequence directly downstream of the first nick (i.e. the endogenous FXN sequence directly downstream of nucleotide 3 of the search target sequence of the 5′ PEgRNA). Contacting the target FXN gene with the dual prime editing system can result in deletion of the sequence between the first nick and the second nick (the deleted region referred to as the IND) that includes the GAA repeats without insertion of an exogenous sequence. In some embodiments, the region of complementarity of the 5′ RTT to the endogenous FXN sequence is at least about 15 nucleotides in length. In some embodiments, the region of complementarity of the 5′ RTT to the endogenous FXN sequence is at least about 20 nucleotides in length. In some embodiments, the region of complementarity of the 5′ RTT to the endogenous FXN sequence is at about 20 to 30 nucleotides in length. In some embodiments, the region of complementarity of the 5′ RTT to the endogenous FXN sequence is at about 20, about 25, or about 30 nucleotides in length. In some embodiments, the region of complementarity of the 3′ RTT to the endogenous FXN sequence is at least about 15 nucleotides in length. In some embodiments, the region of complementarity of the 3′ RTT to the endogenous FXN sequence is at least about 20 nucleotides in length. In some embodiments, the region of complementarity of the 3′ RTT to the endogenous FXN sequence is at about 20 to 30 nucleotides in length. In some embodiments, the region of complementarity of the 3′ RTT to the endogenous FXN sequence is at about 20, about 25, or about 30 nucleotides in length. In some embodiments, the 5′ RTT comprises nucleotides 21-30 of sequence number 2172. In some embodiments, the 5′ RTT comprises nucleotides 16-30 of sequence number 2172. In some embodiments, the 5′ RTT comprises sequence number 2170, 2171, or 2172.

[0530] Alternatively, in some embodiments, the dual prime editing composition can comprise the dual prime editing composition comprises a 5′ PEgRNA having a spacer and a PBS provided in Table 3, and a 3′ PEgRNA having a spacer and a PBS provided in Table 14, and wherein the first editing template comprises nucleotides 5 to 14 of sequence number 632 and a region of complementarity to the second editing template, and the second editing template comprises nucleotides 5 to 14 of sequence number 235 and a region of complementarity to the first editing template. Contacting the target FXN gene with the dual prime editing system can result in deletion of the sequence between the first nick and the second nick (the deleted region referred to as the IND) that includes the GAA repeats and insertion of the overlapping duplex (OD) encoded by the 5′ RTT and the 3′ RTT.

[0531] The 5′ PEgRNA and the 3′ PEgRNA exemplified in Tables 3 and 14 can comprise, from 5′ to 3′, the spacer, the gRNA core, the editing template (RTT), and the PBS. The 3′ end of the RTT can be contiguous with the 5′ end of the PBS. The PEgRNA can comprise multiple RNA molecules or can be a single RNA molecule. Any PEgRNA exemplified in Tables 3 and 14 may comprise, or further comprise, a 3′ motif at the 3′ end of the extension arm, or adaptations used for transcription of the PEgRNA. In some embodiments, a 3′ motif that is capable of forming a tertiary structure on its own, such as a hairpin, a pseudoknot, or other RNA structure or motif is used. In some embodiments, the 3′ motif is connected to the 3′ end of the PBS via a linker sequence. In some embodiments, the 3′ motif comprises SEQ ID NO: 2237. Without being bound by theory, such 3′ motifs are believed to increase PEgRNA stability. PEgRNA sequences exemplified in Tables 3 and 14 may also be adapted for expression from a nucleic acid template with a U6 promoter, for example, by including a 5′ terminal G if the spacer of the PEgRNA begins with another nucleotide, by including an additional A at the 3′ end of the extension arm, and/or by including 6 or 7 U nucleotides at the 3′ end of the extension arm. The modifications included in the selection of full length 5′ PEgRNAs included in Tables 3 and 14 are annotated in column 3 (Description) of the tables.

[0532] The gRNA core sequence of the 5′ PEgRNA and the gRNA core of the 3′ PEgRNA can comprise a sequence selected from any one of SEQ ID NO: 2259-2260 and 2273-2281. It can be advantageous to select the same gRNA core sequence for both the 5′ PEgRNA and the 3′ PEgRNA, thus avoiding the need to use two different Cas9 proteins. If no specific SEQ ID NO is annotated for the gRNA core sequence, a canonical SpCas9 gRNA core sequence (SEQ ID NO: 2260) is used. Alternative gRNA core sequences used are annotated in column 3 of Tables 3 and 14. In some embodiments, the gRNA core of the 5′ PEgRNA and/or the 3′ PEgRNA comprise SEQ ID NO: 2260. In some embodiments, the gRNA core of the 5′ PEgRNA and/or the 3′ PEgRNA comprise SEQ ID NO: 2259.

[0533] Any 5′ PEgRNA and 3′ PEgRNA sequence provided in Tables 3 and 14 may be chemically synthesized and may alternatively or additionally comprise one or more chemical modifications, such as phosphorothioate (PS) bond(s), 2′-O-methylated (2′-Ome) nucleotides, or a combination thereof. In some embodiments, the 5′ PEgRNA and/or the 3′ PEgRNA comprises 3′ mN*mN*mN*N and 5′mN*mN*mN* modifications, where m indicates that the nucleotide contains a 2′-O-Me modification and a * indicates the presence of a phosphorothioate bond.

[0534] In some embodiments, the dual prime editing composition comprises a 5′ PEgRNA and a 3′ PEgRNA, wherein the 5′ PEgRNA comprises sequence number 255, 256, 257, 258, 299, 300, 301, 302, 303, 304, 305, 306, 307, 308, 309, 310, 311, 312, 313, 314, 315, 316, 317, 318, 319, 320, 321, 322, 323, 324, 325, 326, 327, 328, 329, or 330, and wherein the 3′ PEgRNA comprises sequence number 652, 653, 654, 655, 708, 709, 710, 711, 712, 713, 714, 715, 716, 717, 718, 719, 720, 721, 722, 723, 724, 725, 726, 727, 728, 729, 730, 731, 732, 733, 734, 735, 736, 737, 738, or 739.

[0535] In some embodiments, the dual prime editing composition comprises a 5′ PEgRNA and a 3′ PEgRNA, wherein the 5′ PEgRNA comprises sequence number 255, 256, 257, 258, 315, 316, 317, 318, 319, 320, 321, 322, 323, 324, 325, 326, 327, 328, 329, or 330, and wherein the 3′ PEgRNA comprises sequence number 652, 653, 654, 655, 724, 725, 726, 727, 728, 729, 730, 731, 732, 733, 734, 735, 736, 737, 738, or 739. In some embodiments, the dual prime editing composition comprises a 5′ PEgRNA and a 3′ PEgRNA, wherein the 5′ PEgRNA comprises sequence number 259 or 260, and wherein the 3′ PEgRNA comprises sequence number 656 or 657. In some embodiments, the dual prime editing composition comprises a 5′ PEgRNA and a 3′ PEgRNA, wherein the 5′ PEgRNA comprises sequence number 261 or 262, and wherein the 3′ PEgRNA comprises sequence number 658 or 659. In some embodiments, the dual prime editing composition comprises a 5′ PEgRNA and a 3′ PEgRNA, wherein the 5′ PEgRNA comprises sequence number 263 or 264, and wherein the 3′ PEgRNA comprises sequence number 660 or 661. In some embodiments, the dual prime editing composition comprises a 5′ PEgRNA and a 3′ PEgRNA, wherein the 5′ PEgRNA comprises sequence number 265 or 266, and wherein the 3′ PEgRNA comprises sequence number 662 or 663. In some embodiments, the dual prime editing composition comprises a 5′ PEgRNA and a 3′ PEgRNA, wherein the 5′ PEgRNA comprises sequence number 267 or 268, and wherein the 3′ PEgRNA comprises sequence number 664 or 665. In some embodiments, the dual prime editing composition comprises a 5′ PEgRNA and a 3′ PEgRNA, wherein the 5′ PEgRNA comprises sequence number 269 or 270, and wherein the 3′ PEgRNA comprises sequence number 666 or 667. In some embodiments, the dual prime editing composition comprises a 5′ PEgRNA and a 3′ PEgRNA, wherein the 5′ PEgRNA comprises sequence number 271 or 272, and wherein the 3′ PEgRNA comprises sequence number 668 or 669. In some embodiments, the dual prime editing composition comprises a 5′ PEgRNA and a 3′ PEgRNA, wherein the 5′ PEgRNA comprises sequence number 273 or 274, and wherein the 3′ PEgRNA comprises sequence number 670 or 671. In some embodiments, the dual prime editing composition comprises a 5′ PEgRNA and a 3′ PEgRNA, wherein the 5′ PEgRNA comprises sequence number 275 or 276, and wherein the 3′ PEgRNA comprises sequence number 672 or 673. In some embodiments, the dual prime editing composition comprises a 5′ PEgRNA and a 3′ PEgRNA, wherein the 5′ PEgRNA comprises sequence number 277 or 278, and wherein the 3′ PEgRNA comprises sequence number 674 or 675. In some embodiments, the dual prime editing composition comprises a 5′ PEgRNA and a 3′ PEgRNA, wherein the 5′ PEgRNA comprises sequence number 279 or 280, and wherein the 3′ PEgRNA comprises sequence number 676 or 677. In some embodiments, the dual prime editing composition comprises a 5′ PEgRNA and a 3′ PEgRNA, wherein the 5′ PEgRNA comprises sequence number 281 or 282, and wherein the 3′ PEgRNA comprises sequence number 678 or 679. In some embodiments, the dual prime editing composition comprises a 5′ PEgRNA and a 3′ PEgRNA, wherein the 5′ PEgRNA comprises sequence number 283 or 284, and wherein the 3′ PEgRNA comprises sequence number 680 or 681. In some embodiments, the dual prime editing composition comprises a 5′ PEgRNA and a 3′ PEgRNA, wherein the 5′ PEgRNA comprises sequence number 285 or 286, and wherein the 3′ PEgRNA comprises sequence number 682 or 683. In some embodiments, the dual prime editing composition comprises a 5′ PEgRNA and a 3′ PEgRNA, wherein the 5′ PEgRNA comprises sequence number 287 or 288, and wherein the 3′ PEgRNA comprises sequence number 684 or 685. In some embodiments, the dual prime editing composition comprises a 5′ PEgRNA and a 3′ PEgRNA, wherein the 5′ PEgRNA comprises sequence number 289 or 290, and wherein the 3′ PEgRNA comprises sequence number 686 or 687. In some embodiments, the dual prime editing composition comprises a 5′ PEgRNA and a 3′ PEgRNA, wherein the 5′ PEgRNA comprises sequence number 291 or 292, and wherein the 3′ PEgRNA comprises sequence number 688 or 689. In some embodiments, the dual prime editing composition comprises a 5′ PEgRNA and a 3′ PEgRNA, wherein the 5′ PEgRNA comprises sequence number 293 or 294, and wherein the 3′ PEgRNA comprises sequence number 690 or 691. In some embodiments, the dual prime editing composition comprises a 5′ PEgRNA and a 3′ PEgRNA, wherein the 5′ PEgRNA comprises sequence number 295 or 296, and wherein the 3′ PEgRNA comprises sequence number 692 or 693. In some embodiments, the dual prime editing composition comprises a 5′ PEgRNA and a 3′ PEgRNA, wherein the 5′ PEgRNA comprises sequence number 297 or 298, and wherein the 3′ PEgRNA comprises sequence number 694 or 695. Contacting the target FXN gene with the dual prime editing system can result in deletion of the sequence between the first nick and the second nick (the deleted region referred to as the IND) that includes the GAA repeats and insertion of the replacement duplex (RD) encoded by the 5′ RTT and the 3′ RTT.

[0536] In some embodiments, a dual prime editing composition for editing of the GAA repeat expansion in the FXN gene can comprise a 5′ PEgRNA having a spacer and a PBS provided in Table 3, and a 3′ PEgRNA having a spacer and a PBS provided in Table 25. The dual prime editing composition can comprise (A) a 5′ PEgRNA (also referred to as a first PEgRNA) and a (B) 3′ PEgRNA (also referred to as a second PEgRNA), wherein the first PEgRNA comprises (i) a first spacer that comprises at its 3′ end sequence number 235; (ii) a first gRNA core capable of binding to a Cas9 protein; and (iii) a first extension arm comprising a first editing template and a first primer binding site (PBS), wherein the first PBS comprises at its 5′ end sequence number 240; wherein the second PEgRNA comprises (i) a second spacer that comprises at its 3′ end sequence number 1018; (ii) a second gRNA core capable of binding to a Cas9 protein; and (iii) a second extension arm comprising a second editing template and a second PBS, wherein the second PBS comprises at its 5′ end sequence number 1023, and wherein (a) the first editing template comprises a region of complementarity to the second editing template, (b) the first editing template comprises nucleotides 5 to 14 of sequence number 1018 and the second editing template comprises nucleotides 5 to 14 of sequence number 235, or (c) the first editing template comprises nucleotides 5 to 14 of sequence number 1018 and a region of complementarity to the second editing template, and the second editing template comprises nucleotides 5 to 14 of sequence number 235 and a region of complementarity to the first editing template.

[0537] The 5′ PEgRNA spacer can be, for example, 17 to 22 nucleotides in length, and can comprise any one of sequence numbers 234-239. In some embodiments, the 5′ PEgRNA spacer comprises sequence number 234. In some embodiments, the 5′ PEgRNA spacer is 20 nucleotides in length. The PBS of the 5′ PEgRNA can be, for example, 5 to 19 nucleotides in length, and comprise any one of sequence numbers 240-254. In some embodiments, the PBS is 8 to 17 nucleotides in length. In some embodiments, the PBS is 8 to 16 nucleotides in length and comprises any one of sequence numbers 243 to 251. In some embodiments, the PBS is 10 to 12 nucleotides in length and comprises any one of sequence numbers 245 to 247. In some embodiments, the PBS is 10 or 12 nucleotides in length and comprises sequence 245 or 247, respectively.

[0538] The 3′ PEgRNA spacer can be, for example, 17 to 22 nucleotides in length, and can comprise any one of sequence numbers 1017-1022. In some embodiments, the 3′ PEgRNA spacer comprises sequence number 1017. In some embodiments, the 5′ PEgRNA spacer is 20 nucleotides in length. The PBS of the 5′ PEgRNA can be, for example, 5 to 19 nucleotides in length, and comprise any one of sequence numbers 1023-1037. In some embodiments, the PBS is 8 to 17 nucleotides in length. In some embodiments, the PBS is 8 to 16 nucleotides in length and comprises any one of sequence numbers 1026 to 1034. In some embodiments, the PBS is 10 to 12 nucleotides in length and comprises any one of sequence numbers 1028 to 1030. In some embodiments, the PBS is 10 or 12 nucleotides in length and comprises sequence 1928 or 1030, respectively.

[0539] In some embodiments, the dual prime editing composition comprises a 5′ PEgRNA having a spacer and a PBS provided in Table 3, and a 3′ PEgRNA having a spacer and a PBS provided in Table 25, wherein the RTT of the 5′ PEgRNA (the 5′ RTT) comprise a region of complementarity to the RTT of the 3′ PEgRNA (the 3′ RTT). The 5′ PEgRNA is capable of complexing with a prime editor comprising a Cas9 nickase (e.g. a Cas9 having an inactivated HNH nuclease domain) to generate a first nick, and the 3′ PEgRNA is capable of complexing with a prime editor comprising a Cas9 nickase (e.g. a Cas9 having an inactivated HNH nuclease domain) to generate a second nick on the FXN gene. Accordingly, contacting the target FXN gene with the dual prime editing system can result in deletion of the sequence between the first nick and the second nick (the deleted region referred to as the IND) that includes the GAA repeats and insertion of the replacement duplex (RD) encoded by the 5′ RTT and the 3′ RTT. Exemplary completely or partially complementary RTT pairs are provided in Table 56. Each pair of RTT1 and RTT2 that have the same RTT pairing number can be used as the 5′ RTT and the 3′ RTT, respectively, or vice versa. In some embodiments, the 5′ RTT comprises nucleotides 1 to x of SEQ ID NO: a, and the 3′ RTT comprises nucleotides 1 to y of SEQ ID NO: b, wherein x is an integer from 10 to i, i is the length of SEQ ID NO: a, y is an integer from (i+10−x) to i, a is an integer from 1972 to 2070 or from 2401 to 2414, and b is an integer that equals (a+99). In some embodiments, a is an integer from 1972 to 1991 or from 2401 to 2414. In some embodiments, the 3′ RTT comprises nucleotides 1 to x of SEQ ID NO: a, and the 5′ RTT comprises nucleotides 1 to y of SEQ ID NO: b, wherein x is an integer from 10 to i, i is the length of SEQ ID NO: a, y is an integer from (i+10−x) to i, a is an integer from 1972 to 2070 or from 2401 to 2414, and b is an integer that equals (a+99). In some embodiments, a is an integer from 1972 to 1991 or from 2401 to 2414. x can be any integer between 10 and i, for example, from 11, 12, 13, 14, 15, 16, 17, 18, 19, 20, 21, 22, 23, 24, 25, 26, 27, 28, 29 or 30 to i, provided that i is greater or equal to x. In some embodiments, a length of x of at least 15 nucleotides is chosen. In some embodiments, x is an integer from 17 to i. In some embodiments, x is an integer from 19 to i, from 20 to i, from 27 to i, from 28 to i, or from 29 to i. In some embodiments, when the 5′ RTT and the 3′ RTT are completely complementary to each other throughout their entire length, x equals y equals i. In some embodiments, a is 1972 and b is 2071. In some embodiments, a is 1979, 1982, 1985, 1986, or 1991.

[0540] Alternatively, in some embodiments, the dual prime editing composition can comprise the dual prime editing composition comprises a 5′ PEgRNA having a spacer and a PBS provided in Table 3, and a 3′ PEgRNA having a spacer and a PBS provided in Table 25, wherein the first editing template comprises nucleotides 5 to 14 of sequence number 1018 and the second editing template comprises nucleotides 5 to 14 of sequence number 235. The 5′ PEgRNA is capable of complexing with a prime editor comprising a Cas9 nickase (e.g. a Cas9 having an inactivated HNH nuclease domain) to generate a first nick, and the 3′ PEgRNA is capable of complexing with a prime editor comprising a Cas9 nickase (e.g. a Cas9 having an inactivated HNH nuclease domain) to generate a second nick in the FXN gene. Accordingly, the 5′ RTT comprises a region of complementarity to the endogenous FXN sequence directly downstream of the second nick (i.e. the endogenous FXN sequence directly downstream of nucleotide 3 of the search target sequence of the 3′ PEgRNA), and the 3′ RTT comprises a region of complementarity to the endogenous FXN sequence directly downstream of the first nick (i.e. the endogenous FXN sequence directly downstream of nucleotide 3 of the search target sequence of the 5′ PEgRNA). Contacting the target FXN gene with the dual prime editing system can result in deletion of the sequence between the first nick and the second nick (the deleted region referred to as the IND) that includes the GAA repeats without insertion of an exogenous sequence. In some embodiments, the region of complementarity of the 5′ RTT to the endogenous FXN sequence is at least about 15 nucleotides in length. In some embodiments, the region of complementarity of the 5′ RTT to the endogenous FXN sequence is at least about 20 nucleotides in length. In some embodiments, the region of complementarity of the 5′ RTT to the endogenous FXN sequence is at about 20 to 30 nucleotides in length. In some embodiments, the region of complementarity of the 5′ RTT to the endogenous FXN sequence is at about 20, about 25, or about 30 nucleotides in length. In some embodiments, the region of complementarity of the 3′ RTT to the endogenous FXN sequence is at least about 15 nucleotides in length. In some embodiments, the region of complementarity of the 3′ RTT to the endogenous FXN sequence is at least about 20 nucleotides in length. In some embodiments, the region of complementarity of the 3′ RTT to the endogenous FXN sequence is at about 20 to 30 nucleotides in length. In some embodiments, the region of complementarity of the 3′ RTT to the endogenous FXN sequence is at about 20, about 25, or about 30 nucleotides in length. In some embodiments, the 5′ RTT comprises nucleotides 21-30 of sequence number 2175. In some embodiments, the 5′ RTT comprises nucleotides 16-30 of sequence number 2175. In some embodiments, the 5′ RTT comprises sequence number 2173, 2174, or 2175.

[0541] Alternatively, in some embodiments, the dual prime editing composition can comprise the dual prime editing composition comprises a 5′ PEgRNA having a spacer and a PBS provided in Table 3, and a 3′ PEgRNA having a spacer and a PBS provided in Table 25, and wherein the first editing template comprises nucleotides 5 to 14 of sequence number 1018 and a region of complementarity to the second editing template, and the second editing template comprises nucleotides 5 to 14 of sequence number 235 and a region of complementarity to the first editing template. Contacting the target FXN gene with the dual prime editing system can result in deletion of the sequence between the first nick and the second nick (the deleted region referred to as the IND) that includes the GAA repeats and insertion of the overlapping duplex (OD) encoded by the 5′ RTT and the 3′ RTT.

[0542] The 5′ PEgRNA and the 3′ PEgRNA exemplified in Tables 3 and 25 can comprise, from 5′ to 3′, the spacer, the gRNA core, the editing template (RTT), and the PBS. The 3′ end of the RTT can be contiguous with the 5′ end of the PBS. The PEgRNA can comprise multiple RNA molecules or can be a single RNA molecule. Any PEgRNA exemplified in Tables 3 and 25 may comprise, or further comprise, a 3′ motif at the 3′ end of the extension arm, or adaptations used for transcription of the PEgRNA. In some embodiments, a 3′ motif that is capable of forming a tertiary structure on its own, such as a hairpin, a pseudoknot, or other RNA structure or motif is used. In some embodiments, the 3′ motif is connected to the 3′ end of the PBS via a linker sequence. In some embodiments, the 3′ motif comprises SEQ ID NO: 2237. Without being bound by theory, such 3′ motifs are believed to increase PEgRNA stability. PEgRNA sequences exemplified in Tables 3 and 25 may also be adapted for expression from a nucleic acid template with a U6 promoter, for example, by including a 5′ terminal G if the spacer of the PEgRNA begins with another nucleotide, by including an additional A at the 3′ end of the extension arm, and/or by including 6 or 7 U nucleotides at the 3′ end of the extension arm. The modifications included in the selection of full length 5′ PEgRNAs included in Tables 3 and 25 are annotated in column 3 (Description) of the tables.

[0543] The gRNA core sequence of the 5′ PEgRNA and the gRNA core of the 3′ PEgRNA can comprise a sequence selected from any one of SEQ ID NO: 2259-2260 and 2273-2281. It can be advantageous to select the same gRNA core sequence for both the 5′ PEgRNA and the 3′ PEgRNA, thus avoiding the need to use two different Cas9 proteins. If no specific SEQ ID NO is annotated for the gRNA core sequence, a canonical SpCas9 gRNA core sequence (SEQ ID NO: 2260) is used. Alternative gRNA core sequences used are annotated in column 3 of Tables 3 and 25. In some embodiments, the gRNA core of the 5′ PEgRNA and/or the 3′ PEgRNA comprise SEQ ID NO: 2260. In some embodiments, the gRNA core of the 5′ PEgRNA and/or the 3′ PEgRNA comprise SEQ ID NO: 2259.

[0544] Any 5′ PEgRNA and 3′ PEgRNA sequence provided in Tables 3 and 25 maybe chemically synthesized and may alternatively or additionally comprise one or more chemical modifications, such as phosphorothioate (PS) bond(s), 2′-O-methylated (2′-Ome) nucleotides, or a combination thereof. In some embodiments, the 5′ PEgRNA and/or the 3′ PEgRNA comprises 3′ mN*mN*mN*N and 5′mN*mN*mN* modifications, where m indicates that the nucleotide contains a 2′-O-Me modification and a * indicates the presence of a phosphorothioate bond.

[0545] In some embodiments, the dual prime editing composition comprises a 5′ PEgRNA and a 3′ PEgRNA, wherein the 5′ PEgRNA comprises sequence number 255, 256, 257, 258, 299, 300, 301, 302, 303, 304, 305, 306, 307, 308, 309, 310, 311, 312, 313, 314, 315, 316, 317, 318, 319, 320, 321, 322, 323, 324, 325, 326, 327, 328, 329, or 330, and wherein the 3′ PEgRNA comprises sequence number 1038, 1039, 1040, 1041, 1094, 1095, 1096, 1097, 1098, 1099, 1100, 1101, 1102, 1103, 1104, 1105, 1106, 1107, 1108, 1109, 1110, 1111, 1112, 1113, 1114, 1115, 1116, 1117, 1118, 1119, 1120, 1121, 1122, 1123, 1124, 1125, 1128, 1129, 1130, or 1131. In some embodiments, the dual prime editing composition comprises a 5′ PEgRNA and a 3′ PEgRNA, wherein the 5′ PEgRNA comprises sequence number 255, 256, 257, 258, 315, 316, 317, 318, 319, 320, 321, 322, 323, 324, 325, 326, 327, 328, 329, or 330, and wherein the 3′ PEgRNA comprises sequence number 1038, 1039, 1040, 1041, 1098, or 1101. In some embodiments, the dual prime editing composition comprises a 5′ PEgRNA and a 3′ PEgRNA, wherein the 5′ PEgRNA comprises sequence number 259 or 260, and wherein the 3′ PEgRNA comprises sequence number 1042 or 1043. In some embodiments, the dual prime editing composition comprises a 5′ PEgRNA and a 3′ PEgRNA, wherein the 5′ PEgRNA comprises sequence number 261 or 262, and wherein the 3′ PEgRNA comprises sequence number 1044 or 1045. In some embodiments, the dual prime editing composition comprises a 5′ PEgRNA and a 3′ PEgRNA, wherein the 5′ PEgRNA comprises sequence number 263 or 264, and wherein the 3′ PEgRNA comprises sequence number 1046 or 1047. In some embodiments, the dual prime editing composition comprises a 5′ PEgRNA and a 3′ PEgRNA, wherein the 5′ PEgRNA comprises sequence number 265 or 266, and wherein the 3′ PEgRNA comprises sequence number 1048 or 1049. In some embodiments, the dual prime editing composition comprises a 5′ PEgRNA and a 3′ PEgRNA, wherein the 5′ PEgRNA comprises sequence number 267 or 268, and wherein the 3′ PEgRNA comprises sequence number 1050 or 1051. In some embodiments, the dual prime editing composition comprises a 5′ PEgRNA and a 3′ PEgRNA, wherein the 5′ PEgRNA comprises sequence number 269 or 270, and wherein the 3′ PEgRNA comprises sequence number 1052 or 1053. In some embodiments, the dual prime editing composition comprises a 5′ PEgRNA and a 3′ PEgRNA, wherein the 5′ PEgRNA comprises sequence number 271 or 272, and wherein the 3′ PEgRNA comprises sequence number 1054 or 1055. In some embodiments, the dual prime editing composition comprises a 5′ PEgRNA and a 3′ PEgRNA, wherein the 5′ PEgRNA comprises sequence number 273 or 274, and wherein the 3′ PEgRNA comprises sequence number 1056 or 1057. In some embodiments, the dual prime editing composition comprises a 5′ PEgRNA and a 3′ PEgRNA, wherein the 5′ PEgRNA comprises sequence number 275 or 276, and wherein the 3′ PEgRNA comprises sequence number 1058 or 1059. In some embodiments, the dual prime editing composition comprises a 5′ PEgRNA and a 3′ PEgRNA, wherein the 5′ PEgRNA comprises sequence number 277 or 278, and wherein the 3′ PEgRNA comprises sequence number 1060 or 1061. In some embodiments, the dual prime editing composition comprises a 5′ PEgRNA and a 3′ PEgRNA, wherein the 5′ PEgRNA comprises sequence number 279 or 280, and wherein the 3′ PEgRNA comprises sequence number 1062 or 1063. In some embodiments, the dual prime editing composition comprises a 5′ PEgRNA and a 3′ PEgRNA, wherein the 5′ PEgRNA comprises sequence number 281 or 282, and wherein the 3′ PEgRNA comprises sequence number 1064 or 1065. In some embodiments, the dual prime editing composition comprises a 5′ PEgRNA and a 3′ PEgRNA, wherein the 5′ PEgRNA comprises sequence number 283 or 284, and wherein the 3′ PEgRNA comprises sequence number 1066 or 1067. In some embodiments, the dual prime editing composition comprises a 5′ PEgRNA and a 3′ PEgRNA, wherein the 5′ PEgRNA comprises sequence number 285 or 286, and wherein the 3′ PEgRNA comprises sequence number 1068 or 1069. In some embodiments, the dual prime editing composition comprises a 5′ PEgRNA and a 3′ PEgRNA, wherein the 5′ PEgRNA comprises sequence number 287 or 288, and wherein the 3′ PEgRNA comprises sequence number 1070 or 1071. In some embodiments, the dual prime editing composition comprises a 5′ PEgRNA and a 3′ PEgRNA, wherein the 5′ PEgRNA comprises sequence number 289 or 290, and wherein the 3′ PEgRNA comprises sequence number 1072 or 1073. In some embodiments, the dual prime editing composition comprises a 5′ PEgRNA and a 3′ PEgRNA, wherein the 5′ PEgRNA comprises sequence number 291 or 291, and wherein the 3′ PEgRNA comprises sequence number 1074 or 1075. In some embodiments, the dual prime editing composition comprises a 5′ PEgRNA and a 3′ PEgRNA, wherein the 5′ PEgRNA comprises sequence number 293 or 294, and wherein the 3′ PEgRNA comprises sequence number 1076 or 1077. In some embodiments, the dual prime editing composition comprises a 5′ PEgRNA and a 3′ PEgRNA, wherein the 5′ PEgRNA comprises sequence number 295 or 296, and wherein the 3′ PEgRNA comprises sequence number 1078 or 1079. In some embodiments, the dual prime editing composition comprises a 5′ PEgRNA and a 3′ PEgRNA, wherein the 5′ PEgRNA comprises sequence number 297 or 298, and wherein the 3′ PEgRNA comprises sequence number 1080 or 1081. In some embodiments, the dual prime editing composition comprises a 5′ PEgRNA and a 3′ PEgRNA, wherein the 5′ PEgRNA comprises sequence number 2534 or 2538, and wherein the 3′ PEgRNA comprises sequence number 2553 or 2559. In some embodiments, the dual prime editing composition comprises a 5′ PEgRNA and a 3′ PEgRNA, wherein the 5′ PEgRNA comprises sequence number 2535 or 2539, and wherein the 3′ PEgRNA comprises sequence number 2554 or 2560. Contacting the target FXN gene with the dual prime editing system can result in deletion of the sequence between the first nick and the second nick (the deleted region referred to as the IND) that includes the GAA repeats and insertion of the replacement duplex (RD) encoded by the 5′ RTT and the 3′ RTT.

[0546] In some embodiments, a dual prime editing composition for editing of the GAA repeat expansion in the FXN gene can comprise a 5′ PEgRNA having a spacer and a PBS provided in Table 3, and a 3′ PEgRNA having a spacer and a PBS provided in Table 29. The dual prime editing composition can comprise (A) a 5′ PEgRNA (also referred to as a first PEgRNA) and a (B) 3′ PEgRNA (also referred to as a second PEgRNA), wherein the first PEgRNA comprises (i) a first spacer that comprises at its 3′ end sequence number 235; (ii) a first gRNA core capable of binding to a Cas9 protein; and (iii) a first extension arm comprising a first editing template and a first primer binding site (PBS), wherein the first PBS comprises at its 5′ end sequence number 240; wherein the second PEgRNA comprises (i) a second spacer that comprises at its 3′ end sequence number 1216; (ii) a second gRNA core capable of binding to a Cas9 protein; and (iii) a second extension arm comprising a second editing template and a second PBS, wherein the second PBS comprises at its 5′ end sequence number 1221, and wherein (a) the first editing template comprises a region of complementarity to the second editing template, (b) the first editing template comprises nucleotides 5 to 14 of sequence number 1216 and the second editing template comprises nucleotides 5 to 14 of sequence number 235, or (c) the first editing template comprises nucleotides 5 to 14 of sequence number 1216 and a region of complementarity to the second editing template, and the second editing template comprises nucleotides 5 to 14 of sequence number 235 and a region of complementarity to the first editing template.

[0547] The 5′ PEgRNA spacer can be, for example, 17 to 22 nucleotides in length, and can comprise any one of sequence numbers 234-239. In some embodiments, the 5′ PEgRNA spacer comprises sequence number 234. In some embodiments, the 5′ PEgRNA spacer is 20 nucleotides in length. The PBS of the 5′ PEgRNA can be, for example, 5 to 19 nucleotides in length, and comprise any one of sequence numbers 240-254. In some embodiments, the PBS is 8 to 17 nucleotides in length. In some embodiments, the PBS is 8 to 16 nucleotides in length and comprises any one of sequence numbers 243 to 251. In some embodiments, the PBS is 10 to 12 nucleotides in length and comprises any one of sequence numbers 245 to 247. In some embodiments, the PBS is 10 or 12 nucleotides in length and comprises sequence 245 or 247, respectively.

[0548] The 3′ PEgRNA spacer can be, for example, 17 to 22 nucleotides in length, and can comprise any one of sequence numbers 1215-1220. In some embodiments, the 3′ PEgRNA spacer comprises sequence number 1215. In some embodiments, the 5′ PEgRNA spacer is 20 nucleotides in length. The PBS of the 5′ PEgRNA can be, for example, 5 to 19 nucleotides in length, and comprise any one of sequence numbers 1221-1235. In some embodiments, the PBS is 8 to 17 nucleotides in length. In some embodiments, the PBS is 8 to 16 nucleotides in length and comprises any one of sequence numbers 1224 to 1232. In some embodiments, the PBS is 10 to 12 nucleotides in length and comprises any one of sequence numbers 1226 to 1228. In some embodiments, the PBS is 10 or 12 nucleotides in length and comprises sequence 1226 or 1228, respectively.

[0549] In some embodiments, the dual prime editing composition comprises a 5′ PEgRNA having a spacer and a PBS provided in Table 3, and a 3′ PEgRNA having a spacer and a PBS provided in Table 29, wherein the RTT of the 5′ PEgRNA (the 5′ RTT) comprise a region of complementarity to the RTT of the 3′ PEgRNA (the 3′ RTT). The 5′ PEgRNA is capable of complexing with a prime editor comprising a Cas9 nickase (e.g. a Cas9 having an inactivated HNH nuclease domain) to generate a first nick, and the 3′ PEgRNA is capable of complexing with a prime editor comprising a Cas9 nickase (e.g. a Cas9 having an inactivated HNH nuclease domain) to generate a second nick on the FXN gene. Accordingly, contacting the target FXN gene with the dual prime editing system can result in deletion of the sequence between the first nick and the second nick (the deleted region referred to as the IND) that includes the GAA repeats and insertion of the replacement duplex (RD) encoded by the 5′ RTT and the 3′ RTT. Exemplary completely or partially complementary RTT pairs are provided in Table 56. Each pair of RTT1 and RTT2 that have the same RTT pairing number can be used as the 5′ RTT and the 3′ RTT, respectively, or vice versa. In some embodiments, the 5′ RTT comprises nucleotides 1 to x of SEQ ID NO: a, and the 3′ RTT comprises nucleotides 1 to y of SEQ ID NO: b, wherein x is an integer from 10 to i, i is the length of SEQ ID NO: a, y is an integer from (i+10−x) to i, a is an integer from to 2070 or from 2401 to 2414, and b is an integer that equals (a+99). In some embodiments, a is an integer from 1972 to 1991 or from 2401 to 2414. In some embodiments, the 3′ RTT comprises nucleotides 1 to x of SEQ ID NO: a, and the 5′ RTT comprises nucleotides 1 to y of SEQ ID NO: b, wherein x is an integer from 10 to i, i is the length of SEQ ID NO: a, y is an integer from (i+10−x) to i, a is an integer from 1972 to 2070 or from 2401 to 2414, and b is an integer that equals (a+99). In some embodiments, a is an integer from 1972 to 1991 or from 2401 to 2414. x can be any integer between 10 and i, for example, from 11, 12, 13, 14, 15, 16, 17, 18, 19, 20, 21, 22, 23, 24, 25, 26, 27, 28, 29 or 30 to i, provided that i is greater or equal to x. In some embodiments, a length of x of at least 15 nucleotides is chosen. In some embodiments, x is an integer from 17 to i. In some embodiments, x is an integer from 19 to i, from 20 to i, from 27 to i, from 28 to i, or from 29 to i. In some embodiments, when the 5′ RTT and the 3′ RTT are completely complementary to each other throughout their entire length, x equals y equals i. In some embodiments, a is 1972 and b is 2071. In some embodiments, a is 1979, 1982, 1985, 1986, or 1991.

[0550] Alternatively, in some embodiments, the dual prime editing composition can comprise the dual prime editing composition comprises a 5′ PEgRNA having a spacer and a PBS provided in Table 3, and a 3′ PEgRNA having a spacer and a PBS provided in Table 29, wherein the first editing template comprises nucleotides 5 to 14 of sequence number 1216 and the second editing template comprises nucleotides 5 to 14 of sequence number 235. The 5′ PEgRNA is capable of complexing with a prime editor comprising a Cas9 nickase (e.g. a Cas9 having an inactivated HNH nuclease domain) to generate a first nick, and the 3′ PEgRNA is capable of complexing with a prime editor comprising a Cas9 nickase (e.g. a Cas9 having an inactivated HNH nuclease domain) to generate a second nick in the FXN gene. Accordingly, the 5′ RTT comprises a region of complementarity to the endogenous FXN sequence directly downstream of the second nick (i.e. the endogenous FXN sequence directly downstream of nucleotide 3 of the search target sequence of the 3′ PEgRNA), and the 3′ RTT comprises a region of complementarity to the endogenous FXN sequence directly downstream of the first nick (i.e. the endogenous FXN sequence directly downstream of nucleotide 3 of the search target sequence of the 5′ PEgRNA). Contacting the target FXN gene with the dual prime editing system can result in deletion of the sequence between the first nick and the second nick (the deleted region referred to as the IND) that includes the GAA repeats without insertion of an exogenous sequence. In some embodiments, the region of complementarity of the 5′ RTT to the endogenous FXN sequence is at least about 15 nucleotides in length. In some embodiments, the region of complementarity of the 5′ RTT to the endogenous FXN sequence is at least about 20 nucleotides in length. In some embodiments, the region of complementarity of the 5′ RTT to the endogenous FXN sequence is at about 20 to 30 nucleotides in length. In some embodiments, the region of complementarity of the 5′ RTT to the endogenous FXN sequence is at about 20, about 25, or about 30 nucleotides in length. In some embodiments, the region of complementarity of the 3′ RTT to the endogenous FXN sequence is at least about 15 nucleotides in length. In some embodiments, the region of complementarity of the 3′ RTT to the endogenous FXN sequence is at least about 20 nucleotides in length. In some embodiments, the region of complementarity of the 3′ RTT to the endogenous FXN sequence is at about 20 to 30 nucleotides in length. In some embodiments, the region of complementarity of the 3′ RTT to the endogenous FXN sequence is at about 20, about 25, or about 30 nucleotides in length. In some embodiments, the 5′ RTT comprises nucleotides 21-30 of sequence number 2178. In some embodiments, the 5′ RTT comprises nucleotides 16-30 of sequence number 2178. In some embodiments, the 5′ RTT comprises sequence number 2176, 2177, or 2178.

[0551] Alternatively, in some embodiments, the dual prime editing composition can comprise the dual prime editing composition comprises a 5′ PEgRNA having a spacer and a PBS provided in Table 3, and a 3′ PEgRNA having a spacer and a PBS provided in Table 29, and wherein the first editing template comprises nucleotides 5 to 14 of sequence number 1216 and a region of complementarity to the second editing template, and the second editing template comprises nucleotides 5 to 14 of sequence number 235 and a region of complementarity to the first editing template. Contacting the target FXN gene with the dual prime editing system can result in deletion of the sequence between the first nick and the second nick (the deleted region referred to as the IND) that includes the GAA repeats and insertion of the overlapping duplex (OD) encoded by the 5′ RTT and the 3′ RTT.

[0552] The 5′ PEgRNA and the 3′ PEgRNA exemplified in Tables 3 and 29 can comprise, from 5′ to 3′, the spacer, the gRNA core, the editing template (RTT), and the PBS. The 3′ end of the RTT can be contiguous with the 5′ end of the PBS. The PEgRNA can comprise multiple RNA molecules or can be a single RNA molecule. Any PEgRNA exemplified in Tables 3 and 29 may comprise, or further comprise, a 3′ motif at the 3′ end of the extension arm, or adaptations used for transcription of the PEgRNA. In some embodiments, a 3′ motif that is capable of forming a tertiary structure on its own, such as a hairpin, a pseudoknot, or other RNA structure or motif is used. In some embodiments, the 3′ motif is connected to the 3′ end of the PBS via a linker sequence. In some embodiments, the 3′ motif comprises SEQ ID NO: 2237. Without being bound by theory, such 3′ motifs are believed to increase PEgRNA stability. PEgRNA sequences exemplified in Tables 3 and 29 may also be adapted for expression from a nucleic acid template with a U6 promoter, for example, by including a 5′ terminal G if the spacer of the PEgRNA begins with another nucleotide, by including an additional A at the 3′ end of the extension arm, and/or by including 6 or 7 U nucleotides at the 3′ end of the extension arm. The modifications included in the selection of full length 5′ PEgRNAs included in Tables 3 and 29 are annotated in column 3 (Description) of the tables.

[0553] The gRNA core sequence of the 5′ PEgRNA and the gRNA core of the 3′ PEgRNA can comprise a sequence selected from any one of SEQ ID NOs: 2259-60 and 2273-81. It can be advantageous to select the same gRNA core sequence for both the 5′ PEgRNA and the 3′ PEgRNA, thus avoiding the need to use two different Cas9 proteins. If no specific SEQ ID NO is annotated for the gRNA core sequence, a canonical SpCas9 gRNA core sequence (SEQ ID NO: 2260) is used. Alternative gRNA core sequences used are annotated in column 3 of Tables 3 and 29. In some embodiments, the gRNA core of the 5′ PEgRNA and/or the 3′ PEgRNA comprise SEQ ID NO: 2260. In some embodiments, the gRNA core of the 5′ PEgRNA and/or the 3′ PEgRNA comprise SEQ ID NO: 2259.

[0554] Any 5′ PEgRNA and 3′ PEgRNA sequence provided in Tables 3 and 29 may be chemically synthesized and may alternatively or additionally comprise one or more chemical modifications, such as phosphorothioate (PS) bond(s), 2′-O-methylated (2′-Ome) nucleotides, or a combination thereof. In some embodiments, the 5′ PEgRNA and/or the 3′ PEgRNA comprises 3′ mN*mN*mN*N and 5′mN*mN*mN* modifications, where m indicates that the nucleotide contains a 2′-O-Me modification and a * indicates the presence of a phosphorothioate bond.

[0555] In some embodiments, the dual prime editing composition comprises a 5′ PEgRNA and a 3′ PEgRNA, wherein the 5′ PEgRNA comprises sequence number 255, 256, 257, 258, 299, 300, 301, 302, 303, 304, 305, 306, 307, 308, 309, 310, 311, 312, 313, 314, 315, 316, 317, 318, 319, 320, 321, 322, 323, 324, 325, 326, 327, 328, 329, or 330, and wherein the 3′ PEgRNA comprises sequence number 1236, 1237, 1238, 1239, 1292, 1293, 1294, 1295, 1296, 1297, 1298, 1299, 1300, 1301, 1302, 1303, 1304, 1305, 1306, 1307, 1308, 1309, 1310, 1311, 1312, 1313, 1314, 1315, 1316, 1317, 1318, 1319, 1320, 1321, 1322, or 1323. In some embodiments, the dual prime editing composition comprises a 5′ PEgRNA and a 3′ PEgRNA, wherein the 5′ PEgRNA comprises sequence number 255, 256, 257, 258, 315, 316, 317, 318, 319, 320, 321, 322, 323, 324, 325, 326, 327, 328, 329, or 330, and wherein the 3′ PEgRNA comprises sequence number 1236, 1237, 1238, 1239, 1308, 1309, 1310, 1311, 1312, 1313, 1314, 1315, 1316, 1317, 1318, 1319, 1320, or 1321. In some embodiments, the dual prime editing composition comprises a 5′ PEgRNA and a 3′ PEgRNA, wherein the 5′ PEgRNA comprises sequence number 259 or 260, and wherein the 3′ PEgRNA comprises sequence number 1240 or 1241. In some embodiments, the dual prime editing composition comprises a 5′ PEgRNA and a 3′ PEgRNA, wherein the 5′ PEgRNA comprises sequence number 261 or 262, and wherein the 3′ PEgRNA comprises sequence number 1242 or 1243. In some embodiments, the dual prime editing composition comprises a 5′ PEgRNA and a 3′ PEgRNA, wherein the 5′ PEgRNA comprises sequence number 263 or 264, and wherein the 3′ PEgRNA comprises sequence number 1244 or 1245. In some embodiments, the dual prime editing composition comprises a 5′ PEgRNA and a 3′ PEgRNA, wherein the 5′ PEgRNA comprises sequence number 265 or 266, and wherein the 3′ PEgRNA comprises sequence number 1246 or 247. In some embodiments, the dual prime editing composition comprises a 5′ PEgRNA and a 3′ PEgRNA, wherein the 5′ PEgRNA comprises sequence number 267 or 268, and wherein the 3′ PEgRNA comprises sequence number 1248 or 1249. In some embodiments, the dual prime editing composition comprises a 5′ PEgRNA and a 3′ PEgRNA, wherein the 5′ PEgRNA comprises sequence number 269 or 270, and wherein the 3′ PEgRNA comprises sequence number 1250 or 1251. In some embodiments, the dual prime editing composition comprises a 5′ PEgRNA and a 3′ PEgRNA, wherein the 5′ PEgRNA comprises sequence number 271 or 272, and wherein the 3′ PEgRNA comprises sequence number 1252 or 1253. In some embodiments, the dual prime editing composition comprises a 5′ PEgRNA and a 3′ PEgRNA, wherein the 5′ PEgRNA comprises sequence number 273 or 274, and wherein the 3′ PEgRNA comprises sequence number 1254 or 1255. In some embodiments, the dual prime editing composition comprises a 5′ PEgRNA and a 3′ PEgRNA, wherein the 5′ PEgRNA comprises sequence number 275 or 276, and wherein the 3′ PEgRNA comprises sequence number 1256 or 1257. In some embodiments, the dual prime editing composition comprises a 5′ PEgRNA and a 3′ PEgRNA, wherein the 5′ PEgRNA comprises sequence number 277 or 278, and wherein the 3′ PEgRNA comprises sequence number 1258 or 1259. In some embodiments, the dual prime editing composition comprises a 5′ PEgRNA and a 3′ PEgRNA, wherein the 5′ PEgRNA comprises sequence number 279 or 280, and wherein the 3′ PEgRNA comprises sequence number 1260 or 1261. In some embodiments, the dual prime editing composition comprises a 5′ PEgRNA and a 3′ PEgRNA, wherein the 5′ PEgRNA comprises sequence number 281 or 282, and wherein the 3′ PEgRNA comprises sequence number 1262 or 1263. In some embodiments, the dual prime editing composition comprises a 5′ PEgRNA and a 3′ PEgRNA, wherein the 5′ PEgRNA comprises sequence number 283 or 284, and wherein the 3′ PEgRNA comprises sequence number 1264 or 1265. In some embodiments, the dual prime editing composition comprises a 5′ PEgRNA and a 3′ PEgRNA, wherein the 5′ PEgRNA comprises sequence number 285 or 286, and wherein the 3′ PEgRNA comprises sequence number 1266 or 1267. In some embodiments, the dual prime editing composition comprises a 5′ PEgRNA and a 3′ PEgRNA, wherein the 5′ PEgRNA comprises sequence number 287 or 288, and wherein the 3′ PEgRNA comprises sequence number 1268 or 1269. In some embodiments, the dual prime editing composition comprises a 5′ PEgRNA and a 3′ PEgRNA, wherein the 5′ PEgRNA comprises sequence number 289 or 290, and wherein the 3′ PEgRNA comprises sequence number 1270 or 1271. In some embodiments, the dual prime editing composition comprises a 5′ PEgRNA and a 3′ PEgRNA, wherein the 5′ PEgRNA comprises sequence number 291 or 292, and wherein the 3′ PEgRNA comprises sequence number 1272 or 1273. In some embodiments, the dual prime editing composition comprises a 5′ PEgRNA and a 3′ PEgRNA, wherein the 5′ PEgRNA comprises sequence number 293 or 294, and wherein the 3′ PEgRNA comprises sequence number 1274 or 1275. In some embodiments, the dual prime editing composition comprises a 5′ PEgRNA and a 3′ PEgRNA, wherein the 5′ PEgRNA comprises sequence number 295 or 296, and wherein the 3′ PEgRNA comprises sequence number 1276 or 1277. In some embodiments, the dual prime editing composition comprises a 5′ PEgRNA and a 3′ PEgRNA, wherein the 5′ PEgRNA comprises sequence number 297 or 298, and wherein the 3′ PEgRNA comprises sequence number 1278 or 1279. In some embodiments, the dual prime editing composition comprises a 5′ PEgRNA and a 3′ PEgRNA, wherein the 5′ PEgRNA comprises sequence number 2536 or 2540, and wherein the 3′ PEgRNA comprises sequence number 2563. In some embodiments, the dual prime editing composition comprises a 5′ PEgRNA and a 3′ PEgRNA, wherein the 5′ PEgRNA comprises sequence number 2537 or 2541, and wherein the 3′ PEgRNA comprises sequence number 2564 or 2567. Contacting the target FXN gene with the dual prime editing system can result in deletion of the sequence between the first nick and the second nick (the deleted region referred to as the IND) that includes the GAA repeats and insertion of the replacement duplex (RD) encoded by the 5′ RTT and the 3′ RTT.

TABLE 1
Exemplary 5′ PEgRNA and component sequence

| Sequence | | |
|---|---|---|
| number | Sequence | Description |
| 1 | GCAGAGCTGTGTGACCTTGG (SEQ ID NO: 1) | 5′ Spacer |
| 2 | GAGCTGTGTGACCTTGG (SEQ ID NO: 2) | 5′ Spacer |
| 3 | AGAGCTGTGTGACCTTGG (SEQ ID NO: 3) | 5′ Spacer |
| 4 | CAGAGCTGTGTGACCTTGG (SEQ ID NO: 4) | 5′ Spacer |
| 5 | CGCAGAGCTGTGTGACCTTGG (SEQ ID NO: 5) | 5′ Spacer |
| 6 | CCGCAGAGCTGTGTGACCTTGG (SEQ ID NO: 6) | 5′ Spacer |
| 7 | AGGTC | 5′ PBS |
| 8 | AGGTCA | 5′ PBS |
| 9 | AGGTCAC | 5′ PBS |
| 10 | AGGTCACA | 5′ PBS |
| 11 | AGGTCACAC | 5′ PBS |
| 12 | AGGTCACACA (SEQ ID NO: 12) | 5′ PBS |
| 13 | AGGTCACACAG (SEQ ID NO: 13) | 5′ PBS |
| 14 | AGGTCACACAGC (SEQ ID NO: 14) | 5′ PBS |
| 15 | AGGTCACACAGCT (SEQ ID NO: 15) | 5′ PBS |
| 16 | AGGTCACACAGCTC (SEQ ID NO: 16) | 5′ PBS |
| 17 | AGGTCACACAGCTCT (SEQ ID NO: 17) | 5′ PBS |
| 18 | AGGTCACACAGCTCTG (SEQ ID NO: 18) | 5′ PBS |
| 19 | AGGTCACACAGCTCTGC (SEQ ID NO: 19) | 5′ PBS |
| 20 | AGGTCACACAGCTCTGCG (SEQ ID NO: 20) | 5′ PBS |
| 21 | AGGTCACACAGCTCTGCGG (SEQ ID NO: 21) | 5′ PBS |
| 22 | GCAGAGCTGTGTGACCTTGGGTTTTAGAGCTAGAAA | 5′ pegRNA |
| | TAGCAAGTTAAAATAAGGCTAGTCCGTTATCAACTTG | |
| | AAAAAGTGGCACCGAGTCGGTGCGGCTTGTCGACGA | |
| | CGGCGGTCTCCGTCGTCAGGATCATAGGTCACACA | |
| | (SEQ ID NO: 22) | |
| 23 | GCAGAGCTGTGTGACCTTGGGTTTTAGAGCTAGAAA | 5′ pegRNA, |
| | TAGCAAGTTAAAATAAGGCTAGTCCGTTATCAACTTG | transcription |
| | AAAAAGTGGCACCGAGTCGGTGCGGCTTGTCGACGA | adaptation |
| | CGGCGGTCTCCGTCGTCAGGATCATAGGTCACACATT | (3′TTTTTTT) |
| | TTTTT (SEQ ID NO: 23) | |
| 24 | GCAGAGCTGTGTGACCTTGGGTTTTAGAGCTAGAAA | 5′ pegRNA |
| | TAGCAAGTTAAAATAAGGCTAGTCCGTTATCAACTTG | |
| | AAAAAGTGGCACCGAGTCGGTGCGGCTTGTCGACGA | |
| | CGGCGGTCTCCGTCGTCAGGATCATAGGTCACACAG | |
| | C (SEQ ID NO: 24) | |
| 25 | GCAGAGCTGTGTGACCTTGGGTTTTAGAGCTAGAAA | 5′ pegRNA, |
| | TAGCAAGTTAAAATAAGGCTAGTCCGTTATCAACTTG | transcription |
| | AAAAAGTGGCACCGAGTCGGTGCGGCTTGTCGACGA | adaptation |
| | CGGCGGTCTCCGTCGTCAGGATCATAGGTCACACAG | (3′TTTTTTT, 3′A) |
| | CATTTTTTT (SEQ ID NO: 25) | |
| 26 | GCAGAGCTGTGTGACCTTGGGTTTTAGAGCTAGAAA | 5′ pegRNA |
| | TAGCAAGTTAAAATAAGGCTAGTCCGTTATCAACTTG | |
| | AAAAAGTGGCACCGAGTCGGTGCTAAGTCAAATGAG | |
| | ACTTTAGGTCACACA (SEQ ID NO: 26) | |
| 27 | GCAGAGCTGTGTGACCTTGGGTTTTAGAGCTAGAAA | 5′ pegRNA, |
| | TAGCAAGTTAAAATAAGGCTAGTCCGTTATCAACTTG | transcription |
| | AAAAAGTGGCACCGAGTCGGTGCTAAGTCAAATGAG | adaptation |
| | ACTTTAGGTCACACATTTTTTT (SEQ ID NO: 27) | (3′TTTTTTT) |
| 28 | GCAGAGCTGTGTGACCTTGGGTTTTAGAGCTAGAAA | 5′ pegRNA |
| | TAGCAAGTTAAAATAAGGCTAGTCCGTTATCAACTTG | |
| | AAAAAGTGGCACCGAGTCGGTGCAATTTCAAGATCC | |
| | TGCCTAGGTCACACA (SEQ ID NO: 28) | |
| 29 | GCAGAGCTGTGTGACCTTGGGTTTTAGAGCTAGAAA | 5′ pegRNA, |
| | TAGCAAGTTAAAATAAGGCTAGTCCGTTATCAACTTG | transcription |
| | AAAAAGTGGCACCGAGTCGGTGCAATTTCAAGATCC | adaptation |
| | TGCCTAGGTCACACATTTTTTT (SEQ ID NO: 29) | (3′TTTTTTT) |
| 30 | GCAGAGCTGTGTGACCTTGGGTTTTAGAGCTAGAAA | 5′ pegRNA |
| | TAGCAAGTTAAAATAAGGCTAGTCCGTTATCAACTTG | |
| | AAAAAGTGGCACCGAGTCGGTGCTTGCTCTCTGCCAT | |
| | GTACAGGTCACACA (SEQ ID NO: 30) | |
| 31 | GCAGAGCTGTGTGACCTTGGGTTTTAGAGCTAGAAA | 5′ pegRNA, |
| | TAGCAAGTTAAAATAAGGCTAGTCCGTTATCAACTTG | transcription |
| | AAAAAGTGGCACCGAGTCGGTGCTTGCTCTCTGCCAT | adaptation |
| | GTACAGGTCACACATTTTTTT (SEQ ID NO: 31) | (3′TTTTTTT) |
| 32 | GCAGAGCTGTGTGACCTTGGGTTTTAGAGCTAGAAA | 5′ pegRNA |
| | TAGCAAGTTAAAATAAGGCTAGTCCGTTATCAACTTG | |
| | AAAAAGTGGCACCGAGTCGGTGCACCTTTGGCCGTT | |
| | CTAGGTCACACA (SEQ ID NO: 32) | |
| 33 | GCAGAGCTGTGTGACCTTGGGTTTTAGAGCTAGAAA | 5′ pegRNA, |
| | TAGCAAGTTAAAATAAGGCTAGTCCGTTATCAACTTG | transcription |
| | AAAAAGTGGCACCGAGTCGGTGCACCTTTGGCCGTT | adaptation |
| | CTAGGTCACACATTTTTTT (SEQ ID NO: 33) | (3′TTTTTTT) |
| 34 | GCAGAGCTGTGTGACCTTGGGTTTTAGAGCTAGAAA | 5′ pegRNA |
| | TAGCAAGTTAAAATAAGGCTAGTCCGTTATCAACTTG | |
| | AAAAAGTGGCACCGAGTCGGTGCTCTGCCCTCCTCTT | |
| | GGGTAGGTCACACA (SEQ ID NO: 34) | |
| 35 | GCAGAGCTGTGTGACCTTGGGTTTTAGAGCTAGAAA | 5′ pegRNA, |
| | TAGCAAGTTAAAATAAGGCTAGTCCGTTATCAACTTG | transcription |
| | AAAAAGTGGCACCGAGTCGGTGCTCTGCCCTCCTCTT | adaptation |
| | GGGTAGGTCACACATTTTTTT (SEQ ID NO: 35) | (3′TTTTTTT) |
| 36 | GCAGAGCTGTGTGACCTTGGGTTTTAGAGCTAGAAA | 5′ pegRNA |
| | TAGCAAGTTAAAATAAGGCTAGTCCGTTATCAACTTG | |
| | AAAAAGTGGCACCGAGTCGGTGCATGTACGGGCCGT | |
| | CCAGGTCACACA (SEQ ID NO: 36) | |
| 37 | GCAGAGCTGTGTGACCTTGGGTTTTAGAGCTAGAAA | 5′ pegRNA, |
| | TAGCAAGTTAAAATAAGGCTAGTCCGTTATCAACTTG | transcription |
| | AAAAAGTGGCACCGAGTCGGTGCATGTACGGGCCGT | adaptation |
| | CCAGGTCACACATTTTTTT (SEQ ID NO: 37) | (3′TTTTTTT) |
| 38 | GCAGAGCTGTGTGACCTTGGGTTTTAGAGCTAGAAA | 5′ pegRNA |
| | TAGCAAGTTAAAATAAGGCTAGTCCGTTATCAACTTG | |
| | AAAAAGTGGCACCGAGTCGGTGCGGCCTGGACGCCA | |
| | GGCCTAGGTCACACA (SEQ ID NO: 38) | |
| 39 | GCAGAGCTGTGTGACCTTGGGTTTTAGAGCTAGAAA | 5′ pegRNA, |
| | TAGCAAGTTAAAATAAGGCTAGTCCGTTATCAACTTG | transcription |
| | AAAAAGTGGCACCGAGTCGGTGCGGCCTGGACGCCA | adaptation |
| | GGCCTAGGTCACACATTTTTTT (SEQ ID NO: 39) | (3′TTTTTTT) |
| 40 | GCAGAGCTGTGTGACCTTGGGTTTTAGAGCTAGAAA | 5′ pegRNA |
| | TAGCAAGTTAAAATAAGGCTAGTCCGTTATCAACTTG | |
| | AAAAAGTGGCACCGAGTCGGTGCTGCCGCACGGCGG | |
| | CTAGGTCACACA (SEQ ID NO: 40) | |
| 41 | GCAGAGCTGTGTGACCTTGGGTTTTAGAGCTAGAAA | 5′ pegRNA, |
| | TAGCAAGTTAAAATAAGGCTAGTCCGTTATCAACTTG | transcription |
| | AAAAAGTGGCACCGAGTCGGTGCTGCCGCACGGCGG | adaptation |
| | CTAGGTCACACATTTTTTT (SEQ ID NO: 41) | (3′TTTTTTT) |
| 42 | GCAGAGCTGTGTGACCTTGGGTTTTAGAGCTAGAAA | 5′ pegRNA |
| | TAGCAAGTTAAAATAAGGCTAGTCCGTTATCAACTTG | |
| | AAAAAGTGGCACCGAGTCGGTGCTTGGAGTTTGCTC | |
| | TGTGTATGAAGGTCACACA (SEQ ID NO: 42) | |
| 43 | GCAGAGCTGTGTGACCTTGGGTTTTAGAGCTAGAAA | 5′ pegRNA, |
| | TAGCAAGTTAAAATAAGGCTAGTCCGTTATCAACTTG | transcription |
| | AAAAAGTGGCACCGAGTCGGTGCTTGGAGTTTGCTC | adaptation |
| | TGTGTATGAAGGTCACACATTTTTTT (SEQ ID NO: 43) | (3′TTTTTTT) |
| 44 | GCAGAGCTGTGTGACCTTGGGTTTTAGAGCTAGAAA | 5′ pegRNA |
| | TAGCAAGTTAAAATAAGGCTAGTCCGTTATCAACTTG | |
| | AAAAAGTGGCACCGAGTCGGTGCTTTACACTAGATG | |
| | GTGCTGTAGGTCACACA (SEQ ID NO: 44) | |
| 45 | GCAGAGCTGTGTGACCTTGGGTTTTAGAGCTAGAAA | 5′ pegRNA, |
| | TAGCAAGTTAAAATAAGGCTAGTCCGTTATCAACTTG | transcription |
| | AAAAAGTGGCACCGAGTCGGTGCTTTACACTAGATG | adaptation |
| | GTGCTGTAGGTCACACATTTTTTT (SEQ ID NO: 45) | (3′TTTTTTT) |
| 46 | GCAGAGCTGTGTGACCTTGGGTTTTAGAGCTAGAAA | 5′ pegRNA |
| | TAGCAAGTTAAAATAAGGCTAGTCCGTTATCAACTTG | |
| | AAAAAGTGGCACCGAGTCGGTGCACTTCACATCCAG | |
| | TGACGAGAGGTCACACA (SEQ ID NO: 46) | |
| 47 | GCAGAGCTGTGTGACCTTGGGTTTTAGAGCTAGAAA | 5′ pegRNA, |
| | TAGCAAGTTAAAATAAGGCTAGTCCGTTATCAACTTG | transcription |
| | AAAAAGTGGCACCGAGTCGGTGCACTTCACATCCAG | adaptation |
| | TGACGAGAGGTCACACATTTTTTT (SEQ ID NO: 47) | (3′TTTTTTT) |
| 48 | GCAGAGCTGTGTGACCTTGGGTTTTAGAGCTAGAAA | 5′ pegRNA |
| | TAGCAAGTTAAAATAAGGCTAGTCCGTTATCAACTTG | |
| | AAAAAGTGGCACCGAGTCGGTGCGCGGTATCACCTA | |
| | CGACATCAAAGGTCACACA (SEQ ID NO: 48) | |
| 49 | GCAGAGCTGTGTGACCTTGGGTTTTAGAGCTAGAAA | 5′ pegRNA, |
| | TAGCAAGTTAAAATAAGGCTAGTCCGTTATCAACTTG | transcription |
| | AAAAAGTGGCACCGAGTCGGTGCGCGGTATCACCTA | adaptation |
| | CGACATCAAAGGTCACACATTTTTTT (SEQ ID NO: 49) | (3′TTTTTTT) |
| 50 | GCAGAGCTGTGTGACCTTGGGTTTTAGAGCTAGAAA | 5′ pegRNA |
| | TAGCAAGTTAAAATAAGGCTAGTCCGTTATCAACTTG | |
| | AAAAAGTGGCACCGAGTCGGTGCCTGCCCCTGAGGG | |
| | ACGATCCAGGTCACACA (SEQ ID NO: 50) | |
| 51 | GCAGAGCTGTGTGACCTTGGGTTTTAGAGCTAGAAA | 5′ pegRNA, |
| | TAGCAAGTTAAAATAAGGCTAGTCCGTTATCAACTTG | transcription |
| | AAAAAGTGGCACCGAGTCGGTGCCTGCCCCTGAGGG | adaptation |
| | ACGATCCAGGTCACACATTTTTTT (SEQ ID NO: 51) | (3′TTTTTTT) |
| 52 | GCAGAGCTGTGTGACCTTGGGTTTTAGAGCTAGAAA | 5′ pegRNA |
| | TAGCAAGTTAAAATAAGGCTAGTCCGTTATCAACTTG | |
| | AAAAAGTGGCACCGAGTCGGTGCGGGTCTGATGCCC | |
| | GAGACCACGAAGGTCACACA (SEQ ID NO: 52) | |
| 53 | GCAGAGCTGTGTGACCTTGGGTTTTAGAGCTAGAAA | 5′ pegRNA, |
| | TAGCAAGTTAAAATAAGGCTAGTCCGTTATCAACTTG | transcription |
| | AAAAAGTGGCACCGAGTCGGTGCGGGTCTGATGCCC | adaptation |
| | GAGACCACGAAGGTCACACATTTTTTT (SEQ ID NO: | (3′TTTTTTT) |
| | 53) | |
| 54 | GCAGAGCTGTGTGACCTTGGGTTTTAGAGCTAGAAA | 5′ pegRNA |
| | TAGCAAGTTAAAATAAGGCTAGTCCGTTATCAACTTG | |
| | AAAAAGTGGCACCGAGTCGGTGCGCCCCACGGGCCG | |
| | AGTGCGGAGGTCACACA (SEQ ID NO: 54) | |
| 55 | GCAGAGCTGTGTGACCTTGGGTTTTAGAGCTAGAAA | 5′ pegRNA, |
| | TAGCAAGTTAAAATAAGGCTAGTCCGTTATCAACTTG | transcription |
| | AAAAAGTGGCACCGAGTCGGTGCGCCCCACGGGCCG | adaptation |
| | AGTGCGGAGGTCACACATTTTTTT (SEQ ID NO: 55) | (3′TTTTTTT) |
| 56 | GCAGAGCTGTGTGACCTTGGGTTTTAGAGCTAGAAA | 5′ pegRNA |
| | TAGCAAGTTAAAATAAGGCTAGTCCGTTATCAACTTG | |
| | AAAAAGTGGCACCGAGTCGGTGCTAACTGCTCTATA | |
| | TACGAGATTATCAAATCAGGTCACACA (SEQ ID NO: | |
| | 56) | |
| 57 | GCAGAGCTGTGTGACCTTGGGTTTTAGAGCTAGAAA | 5′ pegRNA, |
| | TAGCAAGTTAAAATAAGGCTAGTCCGTTATCAACTTG | transcription |
| | AAAAAGTGGCACCGAGTCGGTGCTAACTGCTCTATA | adaptation |
| | TACGAGATTATCAAATCAGGTCACACATTTTTTT | (3′TTTTTTT) |
| | (SEQ ID NO: 57) | |
| 58 | GCAGAGCTGTGTGACCTTGGGTTTTAGAGCTAGAAA | 5′ pegRNA |
| | TAGCAAGTTAAAATAAGGCTAGTCCGTTATCAACTTG | |
| | AAAAAGTGGCACCGAGTCGGTGCGGTAACGTAATAC | |
| | AAGGAAACATGAGACACAGGTCACACA (SEQ ID NO: | |
| | 58) | |
| 59 | GCAGAGCTGTGTGACCTTGGGTTTTAGAGCTAGAAA | 5′ pegRNA, |
| | TAGCAAGTTAAAATAAGGCTAGTCCGTTATCAACTTG | transcription |
| | AAAAAGTGGCACCGAGTCGGTGCGGTAACGTAATAC | adaptation |
| | AAGGAAACATGAGACACAGGTCACACATTTTTTT | (3′TTTTTTT) |
| | (SEQ ID NO: 59) | |
| 60 | GCAGAGCTGTGTGACCTTGGGTTTTAGAGCTAGAAA | 5′ pegRNA |
| | TAGCAAGTTAAAATAAGGCTAGTCCGTTATCAACTTG | |
| | AAAAAGTGGCACCGAGTCGGTGCCAAGTTGTGCCCC | |
| | TAGTGAGCTTGGATTACAGGTCACACA (SEQ ID NO: | |
| | 60) | |
| 61 | GCAGAGCTGTGTGACCTTGGGTTTTAGAGCTAGAAA | 5′ pegRNA, |
| | TAGCAAGTTAAAATAAGGCTAGTCCGTTATCAACTTG | transcription |
| | AAAAAGTGGCACCGAGTCGGTGCCAAGTTGTGCCCC | adaptation |
| | TAGTGAGCTTGGATTACAGGTCACACATTTTTTT (SEQ | (3′TTTTTTT) |
| | ID NO: 61) | |
| 62 | GCAGAGCTGTGTGACCTTGGGTTTTAGAGCTAGAAA | 5′ pegRNA |
| | TAGCAAGTTAAAATAAGGCTAGTCCGTTATCAACTTG | |
| | AAAAAGTGGCACCGAGTCGGTGCGCGCGAACCTGGG | |
| | ATCGCCATGCATGATAGAGGTCACACA (SEQ ID NO: | |
| | 62) | |
| 63 | GCAGAGCTGTGTGACCTTGGGTTTTAGAGCTAGAAA | 5′ pegRNA, |
| | TAGCAAGTTAAAATAAGGCTAGTCCGTTATCAACTTG | transcription |
| | AAAAAGTGGCACCGAGTCGGTGCGCGCGAACCTGGG | adaptation |
| | ATCGCCATGCATGATAGAGGTCACACATTTTTTT | (3′TTTTTTT) |
| | (SEQ ID NO: 63) | |
| 64 | GCAGAGCTGTGTGACCTTGGGTTTTAGAGCTAGAAA | 5′ pegRNA |
| | TAGCAAGTTAAAATAAGGCTAGTCCGTTATCAACTTG | |
| | AAAAAGTGGCACCGAGTCGGTGCATGATCCTGACGA | |
| | CGGAGACCGCCGTCGTCGACAAGCCAGGTCACACA | |
| | (SEQ ID NO: 64) | |
| 65 | GCAGAGCTGTGTGACCTTGGGTTTTAGAGCTAGAAA | 5′ pegRNA, |
| | TAGCAAGTTAAAATAAGGCTAGTCCGTTATCAACTTG | transcription |
| | AAAAAGTGGCACCGAGTCGGTGCATGATCCTGACGA | adaptation |
| | CGGAGACCGCCGTCGTCGACAAGCCAGGTCACACAT | (3′TTTTTTT) |
| | TTTTTT (SEQ ID NO: 65) | |
| 66 | GCAGAGCTGTGTGACCTTGGGTTTTAGAGCTAGAAA | 5′ pegRNA |
| | TAGCAAGTTAAAATAAGGCTAGTCCGTTATCAACTTG | |
| | AAAAAGTGGCACCGAGTCGGTGCGGCTTGTCGACGA | |
| | CGGCGGTCTCCGTCGTCAGGATCATAGGTCACA (SEQ | |
| | ID NO: 66) | |
| 67 | GCAGAGCTGTGTGACCTTGGGTTTTAGAGCTAGAAA | 5′ pegRNA, |
| | TAGCAAGTTAAAATAAGGCTAGTCCGTTATCAACTTG | transcription |
| | AAAAAGTGGCACCGAGTCGGTGCGGCTTGTCGACGA | adaptation |
| | CGGCGGTCTCCGTCGTCAGGATCATAGGTCACATTTT | (3′TTTTTTT) |
| | TTT (SEQ ID NO: 67) | |
| 68 | GCAGAGCTGTGTGACCTTGGGTTTTAGAGCTAGAAA | 5′ pegRNA |
| | TAGCAAGTTAAAATAAGGCTAGTCCGTTATCAACTTG | |
| | AAAAAGTGGCACCGAGTCGGTGCGGCTTGTCGACGA | |
| | CGGCGGTCTCCGTCGTCAGGATCATAGGTCACAC | |
| | (SEQ ID NO: 68) | |
| 69 | GCAGAGCTGTGTGACCTTGGGTTTTAGAGCTAGAAA | 5′ pegRNA, |
| | TAGCAAGTTAAAATAAGGCTAGTCCGTTATCAACTTG | transcription |
| | AAAAAGTGGCACCGAGTCGGTGCGGCTTGTCGACGA | adaptation |
| | CGGCGGTCTCCGTCGTCAGGATCATAGGTCACACTTT | (3′TTTTTTT) |
| | TTTT (SEQ ID NO: 69) | |
| 70 | GCAGAGCTGTGTGACCTTGGGTTTTAGAGCTAGAAA | 5′ pegRNA |
| | TAGCAAGTTAAAATAAGGCTAGTCCGTTATCAACTTG | |
| | AAAAAGTGGCACCGAGTCGGTGCGGCTTGTCGACGA | |
| | CGGCGGTCTCCGTCGTCAGGATCATAGGTCACACAG | |
| | (SEQ ID NO: 70) | |
| 71 | GCAGAGCTGTGTGACCTTGGGTTTTAGAGCTAGAAA | 5′ pegRNA, |
| | TAGCAAGTTAAAATAAGGCTAGTCCGTTATCAACTTG | transcription |
| | AAAAAGTGGCACCGAGTCGGTGCGGCTTGTCGACGA | adaptation |
| | CGGCGGTCTCCGTCGTCAGGATCATAGGTCACACAG | (3′TTTTTTT) |
| | TTTTTTT (SEQ ID NO: 71) | |
| 72 | GCAGAGCTGTGTGACCTTGGGTTTTAGAGCTAGAAA | 5′ pegRNA, |
| | TAGCAAGTTAAAATAAGGCTAGTCCGTTATCAACTTG | transcription |
| | AAAAAGTGGCACCGAGTCGGTGCGGCTTGTCGACGA | adaptation |
| | CGGCGGTCTCCGTCGTCAGGATCATAGGTCACACAG | (3′TTTTTTT) |
| | CTTTTTTT (SEQ ID NO: 72) | |
| 73 | GCAGAGCTGTGTGACCTTGGGTTTTAGAGCTAGAAA | 5′ pegRNA |
| | TAGCAAGTTAAAATAAGGCTAGTCCGTTATCAACTTG | |
| | AAAAAGTGGCACCGAGTCGGTGCGGCTTGTCGACGA | |
| | CGGCGGTCTCCGTCGTCAGGATCATAGGTCACACAG | |
| | CT (SEQ ID NO: 73) | |
| 74 | GCAGAGCTGTGTGACCTTGGGTTTTAGAGCTAGAAA | 5′ pegRNA, |
| | TAGCAAGTTAAAATAAGGCTAGTCCGTTATCAACTTG | transcription |
| | AAAAAGTGGCACCGAGTCGGTGCGGCTTGTCGACGA | adaptation |
| | CGGCGGTCTCCGTCGTCAGGATCATAGGTCACACAG | (3′TTTTTTT) |
| | CTTTTTTTT (SEQ ID NO: 74) | |
| 75 | GCAGAGCTGTGTGACCTTGGGTTTTAGAGCTAGAAA | 5′ pegRNA |
| | TAGCAAGTTAAAATAAGGCTAGTCCGTTATCAACTTG | |
| | AAAAAGTGGCACCGAGTCGGTGCGGCTTGTCGACGA | |
| | CGGCGGTCTCCGTCGTCAGGATCATAGGTCACACAG | |
| | CTC (SEQ ID NO: 75) | |
| 76 | GCAGAGCTGTGTGACCTTGGGTTTTAGAGCTAGAAA | 5′ pegRNA, |
| | TAGCAAGTTAAAATAAGGCTAGTCCGTTATCAACTTG | transcription |
| | AAAAAGTGGCACCGAGTCGGTGCGGCTTGTCGACGA | adaptation |
| | CGGCGGTCTCCGTCGTCAGGATCATAGGTCACACAG | (3′TTTTTTT) |
| | CTCTTTTTTT (SEQ ID NO: 76) | |
| 77 | GCAGAGCTGTGTGACCTTGGGTTTTAGAGCTAGAAA | 5′ pegRNA |
| | TAGCAAGTTAAAATAAGGCTAGTCCGTTATCAACTTG | |
| | AAAAAGTGGCACCGAGTCGGTGCGGCTTGTCGACGA | |
| | CGGCGGTCTCCGTCGTCAGGATCATAGGTCACACAG | |
| | CTCT (SEQ ID NO: 77) | |
| 78 | GCAGAGCTGTGTGACCTTGGGTTTTAGAGCTAGAAA | 5′ pegRNA, |
| | TAGCAAGTTAAAATAAGGCTAGTCCGTTATCAACTTG | transcription |
| | AAAAAGTGGCACCGAGTCGGTGCGGCTTGTCGACGA | adaptation |
| | CGGCGGTCTCCGTCGTCAGGATCATAGGTCACACAG | (3′TTTTTTT) |
| | CTCTTTTTTTT (SEQ ID NO: 78) | |
| 79 | GCAGAGCTGTGTGACCTTGGGTTTTAGAGCTAGAAA | 5′ pegRNA |
| | TAGCAAGTTAAAATAAGGCTAGTCCGTTATCAACTTG | |
| | AAAAAGTGGCACCGAGTCGGTGCGGCTTGTCGACGA | |
| | CGGCGGTCTCCGTCGTCAGGATCATAGGTCACACAG | |
| | CTCTG (SEQ ID NO: 79) | |
| 80 | GCAGAGCTGTGTGACCTTGGGTTTTAGAGCTAGAAA | 5′ pegRNA, |
| | TAGCAAGTTAAAATAAGGCTAGTCCGTTATCAACTTG | transcription |
| | AAAAAGTGGCACCGAGTCGGTGCGGCTTGTCGACGA | adaptation |
| | CGGCGGTCTCCGTCGTCAGGATCATAGGTCACACAG | (3′TTTTTTT) |
| | CTCTGTTTTTTT (SEQ ID NO: 80) | |
| 81 | GCAGAGCTGTGTGACCTTGGGTTTTAGAGCTAGAAA | 5′ pegRNA |
| | TAGCAAGTTAAAATAAGGCTAGTCCGTTATCAACTTG | |
| | AAAAAGTGGCACCGAGTCGGTGCGGCTTGTCGACGA | |
| | CGGCGGTCTCCGTCGTCAGGATCATAGGTCACACAG | |
| | CTCTGC (SEQ ID NO: 81) | |
| 82 | GCAGAGCTGTGTGACCTTGGGTTTTAGAGCTAGAAA | 5′ pegRNA, |
| | TAGCAAGTTAAAATAAGGCTAGTCCGTTATCAACTTG | transcription |
| | AAAAAGTGGCACCGAGTCGGTGCGGCTTGTCGACGA | adaptation |
| | CGGCGGTCTCCGTCGTCAGGATCATAGGTCACACAG | (3′TTTTTTT) |
| | CTCTGCTTTTTTT (SEQ ID NO: 82) | |
| 83 | GCAGAGCTGTGTGACCTTGGGTTTAAGAGCGGGGAA | 5′ pegRNA, gRNA |
| | ATCCGCAAGTTTAAATAAGGCTAGTCCGTTATCAGCG | core SEQ ID NO: |
| | TGAAAACGCGGCACCGAGTCGGTGCGGCTTGTCGAC | 2259 |
| | GACGGCGGTCTCCGTCGTCAGGATCATAGGTCACAC | |
| | (SEQ ID NO: 83) | |
| 84 | GCAGAGCTGTGTGACCTTGGGTTTAAGAGCGGGGAA | 5′ pegRNA, |
| | ATCCGCAAGTTTAAATAAGGCTAGTCCGTTATCAGCG | transcription |
| | TGAAAACGCGGCACCGAGTCGGTGCGGCTTGTCGAC | adaptation |
| | GACGGCGGTCTCCGTCGTCAGGATCATAGGTCACAC | (3′TTTTTTT), gRNA |
| | TTTTTTT (SEQ ID NO: 84) | core SEQ ID NO: |
| | | 2259 |
| 85 | GCAGAGCTGTGTGACCTTGGGTTTTAGAGCTAGAAA | 5′ pegRNA, linker |
| | TAGCAAGTTAAAATAAGGCTAGTCCGTTATCAACTTG | sequence number |
| | AAAAAGTGGCACCGAGTCGGTGCGGCTTGTCGACGA | 2238, 3′ motif SEQ |
| | CGGCGGTCTCCGTCGTCAGGATCATAGGTCACACGT | ID NO: 2237 |
| | AGATCGCGGTTCTATCTAGTTACGCGTTAAACCAACT | |
| | AGAA (SEQ ID NO: 85) | |
| 86 | GCAGAGCTGTGTGACCTTGGGTTTTAGAGCTAGAAA | 5′ pegRNA, linker |
| | TAGCAAGTTAAAATAAGGCTAGTCCGTTATCAACTTG | sequence number |
| | AAAAAGTGGCACCGAGTCGGTGCGGCTTGTCGACGA | 2238, 3′ motif SEQ |
| | CGGCGGTCTCCGTCGTCAGGATCATAGGTCACACGT | ID NO: 2237, |
| | AGATCGCGGTTCTATCTAGTTACGCGTTAAACCAACT | transcription |
| | AGAATTTTTTT (SEQ ID NO: 86) | adaptation |
| | | (3′TTTTTTT) |
| 87 | GCAGAGCTGTGTGACCTTGGGTTTTAGAGCTAGAAA | 5′ pegRNA, linker |
| | TAGCAAGTTAAAATAAGGCTAGTCCGTTATCAACTTG | sequence number |
| | AAAAAGTGGCACCGAGTCGGTGCGGCTTGTCGACGA | 2252, 3′ motif SEQ |
| | CGGCGGTCTCCGTCGTCAGGATCATAGGTCACACATC | ID NO: 2237 |
| | GATCGCGGTTCTATCTAGTTACGCGTTAAACCAACTA | |
| | GAA (SEQ ID NO: 87) | |
| 88 | GCAGAGCTGTGTGACCTTGGGTTTTAGAGCTAGAAA | 5′ pegRNA, linker |
| | TAGCAAGTTAAAATAAGGCTAGTCCGTTATCAACTTG | sequence number |
| | AAAAAGTGGCACCGAGTCGGTGCGGCTTGTCGACGA | 2252, 3′ motif SEQ |
| | CGGCGGTCTCCGTCGTCAGGATCATAGGTCACACATC | ID NO: 2237, |
| | GATCGCGGTTCTATCTAGTTACGCGTTAAACCAACTA | transcription |
| | GAATTTTTTT (SEQ ID NO: 88) | adaptation |
| | | (3′TTTTTTT) |
| 89 | GCAGAGCTGTGTGACCTTGGGTTTAAGAGCGGGGAA | 5′ pegRNA, linker |
| | ATCCGCAAGTTTAAATAAGGCTAGTCCGTTATCAGCG | sequence number |
| | TGAAAACGCGGCACCGAGTCGGTGCGGCTTGTCGAC | 2240, 3′ motif SEQ |
| | GACGGCGGTCTCCGTCGTCAGGATCATAGGTCACAC | ID NO: 2237, gRNA |
| | AAGAGTCGCGGTTCTATCTAGTTACGCGTTAAACCAA | core SEQ ID NO: |
| | CTAGAA (SEQ ID NO: 89) | 2259 |
| 90 | GCAGAGCTGTGTGACCTTGGGTTTAAGAGCGGGGAA | 5′ pegRNA, linker |
| | ATCCGCAAGTTTAAATAAGGCTAGTCCGTTATCAGCG | sequence number |
| | TGAAAACGCGGCACCGAGTCGGTGCGGCTTGTCGAC | 2240, 3′ motif SEQ |
| | GACGGCGGTCTCCGTCGTCAGGATCATAGGTCACAC | ID NO: 2237, |
| | AAGAGTCGCGGTTCTATCTAGTTACGCGTTAAACCAA | transcription |
| | CTAGAATTTTTTT (SEQ ID NO: 90) | adaptation |
| | | (3′TTTTTTT), gRNA |
| | | core SEQ ID NO: |
| | | 2259 |
| 91 | GCAGAGCTGTGTGACCTTGGGTTTAAGAGCGGGGAA | 5′ pegRNA, linker |
| | ATCCGCAAGTTTAAATAAGGCTAGTCCGTTATCAGCG | sequence number |
| | TGAAAACGCGGCACCGAGTCGGTGCGGCTTGTCGAC | 2242, 3′ motif SEQ |
| | GACGGCGGTCTCCGTCGTCAGGATCATAGGTCACAC | ID NO: 2237, gRNA |
| | ATACGTCGCGGTTCTATCTAGTTACGCGTTAAACCAA | core SEQ ID NO: |
| | CTAGAA (SEQ ID NO: 91) | 2259 |
| 92 | GCAGAGCTGTGTGACCTTGGGTTTAAGAGCGGGGAA | 5′ pegRNA, 3′ motif |
| | ATCCGCAAGTTTAAATAAGGCTAGTCCGTTATCAGCG | SEQ ID NO: 2242, |
| | TGAAAACGCGGCACCGAGTCGGTGCGGCTTGTCGAC | transcription |
| | GACGGCGGTCTCCGTCGTCAGGATCATAGGTCACAC | adaptation |
| | ATACGTCGCGGTTCTATCTAGTTACGCGTTAAACCAA | (3′TTTTTTT), gRNA |
| | CTAGAATTTTTTT (SEQ ID NO: 92) | core SEQ ID NO: |
| | | 2259 |
| 93 | GCAGAGCTGTGTGACCTTGGGTATAAGAGCGGGGAA | 5′ pegRNA, gRNA |
| | ATCCGCATGTTTATATAAGGCTAGTCCGTTATCAGCG | core SEQ ID NO: |
| | TGAAAGCGCGGCACCGAATCGGTGTGGCTTGTCGAC | 2261 |
| | GACGGCGGTCTCCGTCGTCAGGATCATAGGTCACAC | |
| | (SEQ ID NO: 93) | |
| 94 | GCAGAGCTGTGTGACCTTGGGTATAAGAGCGGGGAA | 5′ pegRNA, |
| | ATCCGCATGTTTATATAAGGCTAGTCCGTTATCAGCG | transcription |
| | TGAAAGCGCGGCACCGAATCGGTGTGGCTTGTCGAC | adaptation |
| | GACGGCGGTCTCCGTCGTCAGGATCATAGGTCACAC | (3′TTTTTTT), gRNA |
| | TTTTTTT (SEQ ID NO: 94) | core SEQ ID NO: |
| | | 2261 |
| 95 | GCAGAGCTGTGTGACCTTGGGTATAAGAGCGGGGAA | 5′ pegRNA, gRNA |
| | ATCCGCATGTTTATATAAGGCTAGTCCGTTATCAGCG | core SEQ ID NO: |
| | TGAAAGCGCGGCACCGAGTCGGTGTGGCTTGTCGAC | 2262 |
| | GACGGCGGTCTCCGTCGTCAGGATCATAGGTCACAC | |
| | (SEQ ID NO: 95) | |
| 96 | GCAGAGCTGTGTGACCTTGGGTATAAGAGCGGGGAA | 5′ pegRNA, |
| | ATCCGCATGTTTATATAAGGCTAGTCCGTTATCAGCG | transcription |
| | TGAAAGCGCGGCACCGAGTCGGTGTGGCTTGTCGAC | adaptation |
| | GACGGCGGTCTCCGTCGTCAGGATCATAGGTCACAC | (3′TTTTTTT), gRNA |
| | TTTTTTT (SEQ ID NO: 96) | core SEQ ID NO: |
| | | 2262 |
| 98 | GCAGAGCTGTGTGACCTTGGGTTTTAGAGCTAGAAA | 5′ pegRNA, |
| | TAGCAAGTTAAAATAAGGCTAGTCCGTTATCAACTTG | transcription |
| | AAAAAGTGGCACCGAGTCGGTGCGGCTTGTCGACGA | adaptation (3′ TTTT) |
| | CGGCGGTCTCCGTCGTCAGGATCATAGGTCACACATT | |
| | TT (SEQ ID NO: 98) | |
| 99 | GCAGAGCTGTGTGACCTTGGGTTTTAGAGCTAGAAA | 5′ pegRNA, |
| | TAGCAAGTTAAAATAAGGCTAGTCCGTTATCAACTTG | transcription |
| | AAAAAGTGGCACCGAGTCGGTGCGGCTTGTCGACGA | adaptation (3′ TTTT) |
| | CGGCGGTCTCCGTCGTCAGGATCATAGGTCACACAG | |
| | CATTTT (SEQ ID NO: 99) | |
| 100 | GCAGAGCTGTGTGACCTTGGGTTTTAGAGCTAGAAA | 5′ pegRNA |
| | TAGCAAGTTAAAATAAGGCTAGTCCGTTATCAACTTG | |
| | AAAAAGTGGCACCGAGTCGGTGCGGCTTGTCGACGA | |
| | CGGCGGTCTCCGTCGTCAGGATCATAGGTCACACAG | |
| | CA (SEQ ID NO: 100) | |
| 2514 | GCAGAGCTGTGTGACCTTGGGTTTTAGAGCTAGAAA | 5′ pegRNA |
| | TAGCAAGTTAAAATAAGGCTAGTCCGTTATCAACTTG | |
| | AAAAAGTGGCACCGAGTCGGTGCCTACTGACTCCTT | |
| | CAACGACTCTGGGTGTTACAGGTTCGCTCACGCCTAA | |
| | GGTCACACAGC (SEQ ID NO: 2514) | |
| 2515 | GCAGAGCTGTGTGACCTTGGGTTTTAGAGCTAGAAA | 5′ pegRNA |
| | TAGCAAGTTAAAATAAGGCTAGTCCGTTATCAACTTG | |
| | AAAAAGTGGCACCGAGTCGGTGCTGACTCCTTCAAC | |
| | GACTCTGGGTGTTACAGGTTCGCTCACGCCTAAGGTC | |
| | ACACAGC (SEQ ID NO: 2515) | |
| 2516 | GCAGAGCTGTGTGACCTTGGGTTTTAGAGCTAGAAA | 5′ pegRNA |
| | TAGCAAGTTAAAATAAGGCTAGTCCGTTATCAACTTG | |
| | AAAAAGTGGCACCGAGTCGGTGCGATTTGCCGCCCC | |
| | TACTGACTCCTTCAACGACTCTGGGTGTTACAGGTTC | |
| | GCTCACGCCTAAGGTCACACAGC (SEQ ID NO: 2516) | |
| 2517 | GCAGAGCTGTGTGACCTTGGGTTTTAGAGCTAGAAA | 5′ pegRNA |
| | TAGCAAGTTAAAATAAGGCTAGTCCGTTATCAACTTG | |
| | AAAAAGTGGCACCGAGTCGGTGCGCCGCCCCTACTG | |
| | ACTCCTTCAACGACTCTGGGTGTTACAGGTTCGCTCA | |
| | CGCCTAAGGTCACACAGC (SEQ ID NO: 2517) | |
| 2518 | GCAGAGCTGTGTGACCTTGGGTTTTAGAGCTAGAAA | 5′ pegRNA |
| | TAGCAAGTTAAAATAAGGCTAGTCCGTTATCAACTTG | |
| | AAAAAGTGGCACCGAGTCGGTGCCTACTGACTCCTT | |
| | CAACGACTCTGGGTGTTACAGGTTCGCTCACGCCTAA | |
| | GGTCACACAGCT (SEQ ID NO: 2518) | |
| 2519 | GCAGAGCTGTGTGACCTTGGGTTTTAGAGCTAGAAA | 5′ pegRNA |
| | TAGCAAGTTAAAATAAGGCTAGTCCGTTATCAACTTG | |
| | AAAAAGTGGCACCGAGTCGGTGCTGACTCCTTCAAC | |
| | GACTCTGGGTGTTACAGGTTCGCTCACGCCTAAGGTC | |
| | ACACAGCT (SEQ ID NO: 2519) | |
| 2520 | GCAGAGCTGTGTGACCTTGGGTTTTAGAGCTAGAAA | 5′ pegRNA |
| | TAGCAAGTTAAAATAAGGCTAGTCCGTTATCAACTTG | |
| | AAAAAGTGGCACCGAGTCGGTGCGATTTGCCGCCCC | |
| | TACTGACTCCTTCAACGACTCTGGGTGTTACAGGTTC | |
| | GCTCACGCCTAAGGTCACACAGCT (SEQ ID NO: 2520) | |
| 2521 | GCAGAGCTGTGTGACCTTGGGTTTTAGAGCTAGAAA | 5′ pegRNA |
| | TAGCAAGTTAAAATAAGGCTAGTCCGTTATCAACTTG | |
| | AAAAAGTGGCACCGAGTCGGTGCGCCGCCCCTACTG | |
| | ACTCCTTCAACGACTCTGGGTGTTACAGGTTCGCTCA | |
| | CGCCTAAGGTCACACAGCT (SEQ ID NO: 2521) | |

TABLE 2
Exemplary 5′ PEgRNA and component sequence

| Sequence | | |
|---|---|---|
| number | Sequence | Description |
| 101 | TATCTGACCCAGTTACGCCA (SEQ ID NO: 101) | 5′ Spacer |
| 102 | CTGACCCAGTTACGCCA (SEQ ID NO: 102) | 5′ Spacer |
| 103 | TCTGACCCAGTTACGCCA (SEQ ID NO: 103) | 5′ Spacer |
| 104 | ATCTGACCCAGTTACGCCA (SEQ ID NO: 104) | 5′ Spacer |
| 105 | ATATCTGACCCAGTTACGCCA (SEQ ID NO: 105) | 5′ Spacer |
| 106 | AATATCTGACCCAGTTACGCCA (SEQ ID NO: 106) | 5′ Spacer |
| 107 | CGTAA | 5′ PBS |
| 108 | CGTAAC | 5′ PBS |
| 109 | CGTAACT | 5′ PBS |
| 110 | CGTAACTG | 5′ PBS |
| 111 | CGTAACTGG | 5′ PBS |
| 112 | CGTAACTGGG (SEQ ID NO: 112) | 5′ PBS |
| 113 | CGTAACTGGGT (SEQ ID NO: 113) | 5′ PBS |
| 114 | CGTAACTGGGTC (SEQ ID NO: 114) | 5′ PBS |
| 115 | CGTAACTGGGTCA (SEQ ID NO: 115) | 5′ PBS |
| 116 | CGTAACTGGGTCAG (SEQ ID NO: 116) | 5′ PBS |
| 117 | CGTAACTGGGTCAGA (SEQ ID NO: 117) | 5′ PBS |
| 118 | CGTAACTGGGTCAGAT (SEQ ID NO: 118) | 5′ PBS |
| 119 | CGTAACTGGGTCAGATA (SEQ ID NO: 119) | 5′ PBS |
| 120 | CGTAACTGGGTCAGATAT (SEQ ID NO: 120) | 5′ PBS |
| 121 | CGTAACTGGGTCAGATATT (SEQ ID NO: 121) | 5′ PBS |
| 122 | TATCTGACCCAGTTACGCCAGTTTTAGAGCTAGAAAT | 5′ pegRNA |
| | AGCAAGTTAAAATAAGGCTAGTCCGTTATCAACTTG | |
| | AAAAAGTGGCACCGAGTCGGTGCGGCTTGTCGACGA | |
| | CGGCGGTCTCCGTCGTCAGGATCATCGTAACTGGG | |
| | (SEQ ID NO: 122) | |
| 123 | GTATCTGACCCAGTTACGCCAGTTTTAGAGCTAGAAA | 5′ pegRNA, |
| | TAGCAAGTTAAAATAAGGCTAGTCCGTTATCAACTTG | transcription |
| | AAAAAGTGGCACCGAGTCGGTGCGGCTTGTCGACGA | adaptation (5′G, |
| | CGGCGGTCTCCGTCGTCAGGATCATCGTAACTGGGTT | 3′TTTTTTT) |
| | TTTTT (SEQ ID NO: 123) | |
| 124 | TATCTGACCCAGTTACGCCAGTTTTAGAGCTAGAAAT | 5′ pegRNA |
| | AGCAAGTTAAAATAAGGCTAGTCCGTTATCAACTTG | |
| | AAAAAGTGGCACCGAGTCGGTGCGGCTTGTCGACGA | |
| | CGGCGGTCTCCGTCGTCAGGATCATCGTAACTGGGTC | |
| | (SEQ ID NO: 124) | |
| 125 | GTATCTGACCCAGTTACGCCAGTTTTAGAGCTAGAAA | 5′ pegRNA, |
| | TAGCAAGTTAAAATAAGGCTAGTCCGTTATCAACTTG | transcription |
| | AAAAAGTGGCACCGAGTCGGTGCGGCTTGTCGACGA | adaptation (5′G, |
| | CGGCGGTCTCCGTCGTCAGGATCATCGTAACTGGGTC | 3′TTTTTTT) |
| | TTTTTTT (SEQ ID NO: 125) | |
| 126 | TATCTGACCCAGTTACGCCAGTTTTAGAGCTAGAAAT | 5′ pegRNA |
| | AGCAAGTTAAAATAAGGCTAGTCCGTTATCAACTTG | |
| | AAAAAGTGGCACCGAGTCGGTGCTAAGTCAAATGAG | |
| | ACTTTCGTAACTGGG (SEQ ID NO: 126) | |
| 127 | GTATCTGACCCAGTTACGCCAGTTTTAGAGCTAGAAA | 5′ pegRNA, |
| | TAGCAAGTTAAAATAAGGCTAGTCCGTTATCAACTTG | transcription |
| | AAAAAGTGGCACCGAGTCGGTGCTAAGTCAAATGAG | adaptation (5′G, |
| | ACTTTCGTAACTGGGTTTTTTT (SEQ ID NO: 127) | 3′TTTTTTT) |
| 128 | TATCTGACCCAGTTACGCCAGTTTTAGAGCTAGAAAT | 5′ pegRNA |
| | AGCAAGTTAAAATAAGGCTAGTCCGTTATCAACTTG | |
| | AAAAAGTGGCACCGAGTCGGTGCAATTTCAAGATCC | |
| | TGCCTCGTAACTGGG (SEQ ID NO: 128) | |
| 129 | GTATCTGACCCAGTTACGCCAGTTTTAGAGCTAGAAA | 5′ pegRNA, |
| | TAGCAAGTTAAAATAAGGCTAGTCCGTTATCAACTTG | transcription |
| | AAAAAGTGGCACCGAGTCGGTGCAATTTCAAGATCC | adaptation (5′G, |
| | TGCCTCGTAACTGGGTTTTTTT (SEQ ID NO: 129) | 3′TTTTTTT) |
| 130 | TATCTGACCCAGTTACGCCAGTTTTAGAGCTAGAAAT | 5′ pegRNA |
| | AGCAAGTTAAAATAAGGCTAGTCCGTTATCAACTTG | |
| | AAAAAGTGGCACCGAGTCGGTGCTTGCTCTCTGCCAT | |
| | GTACCGTAACTGGG (SEQ ID NO: 130) | |
| 131 | GTATCTGACCCAGTTACGCCAGTTTTAGAGCTAGAAA | 5′ pegRNA, |
| | TAGCAAGTTAAAATAAGGCTAGTCCGTTATCAACTTG | transcription |
| | AAAAAGTGGCACCGAGTCGGTGCTTGCTCTCTGCCAT | adaptation (5′G, |
| | GTACCGTAACTGGGTTTTTTT (SEQ ID NO: 131) | 3′TTTTTTT) |
| 132 | TATCTGACCCAGTTACGCCAGTTTTAGAGCTAGAAAT | 5′ pegRNA |
| | AGCAAGTTAAAATAAGGCTAGTCCGTTATCAACTTG | |
| | AAAAAGTGGCACCGAGTCGGTGCACCTTTGGCCGTT | |
| | CTCGTAACTGGG (SEQ ID NO: 132) | |
| 133 | GTATCTGACCCAGTTACGCCAGTTTTAGAGCTAGAAA | 5′ pegRNA, |
| | TAGCAAGTTAAAATAAGGCTAGTCCGTTATCAACTTG | transcription |
| | AAAAAGTGGCACCGAGTCGGTGCACCTTTGGCCGTT | adaptation (5′G, |
| | CTCGTAACTGGGTTTTTTT (SEQ ID NO: 133) | 3′TTTTTTT) |
| 134 | TATCTGACCCAGTTACGCCAGTTTTAGAGCTAGAAAT | 5′ pegRNA |
| | AGCAAGTTAAAATAAGGCTAGTCCGTTATCAACTTG | |
| | AAAAAGTGGCACCGAGTCGGTGCTCTGCCCTCCTCTT | |
| | GGGTCGTAACTGGG (SEQ ID NO: 134) | |
| 135 | GTATCTGACCCAGTTACGCCAGTTTTAGAGCTAGAAA | 5′ pegRNA, |
| | TAGCAAGTTAAAATAAGGCTAGTCCGTTATCAACTTG | transcription |
| | AAAAAGTGGCACCGAGTCGGTGCTCTGCCCTCCTCTT | adaptation (5′G, |
| | GGGTCGTAACTGGGTTTTTTT (SEQ ID NO: 135) | 3′TTTTTTT) |
| 136 | TATCTGACCCAGTTACGCCAGTTTTAGAGCTAGAAAT | 5′ pegRNA |
| | AGCAAGTTAAAATAAGGCTAGTCCGTTATCAACTTG | |
| | AAAAAGTGGCACCGAGTCGGTGCATGTACGGGCCGT | |
| | CCCGTAACTGGG (SEQ ID NO: 136) | |
| 137 | GTATCTGACCCAGTTACGCCAGTTTTAGAGCTAGAAA | 5′ pegRNA, |
| | TAGCAAGTTAAAATAAGGCTAGTCCGTTATCAACTTG | transcription |
| | AAAAAGTGGCACCGAGTCGGTGCATGTACGGGCCGT | adaptation (5′G, |
| | CCCGTAACTGGGTTTTTTT (SEQ ID NO: 137) | 3′TTTTTTT) |
| 138 | TATCTGACCCAGTTACGCCAGTTTTAGAGCTAGAAAT | 5′ pegRNA |
| | AGCAAGTTAAAATAAGGCTAGTCCGTTATCAACTTG | |
| | AAAAAGTGGCACCGAGTCGGTGCGGCCTGGACGCCA | |
| | GGCCTCGTAACTGGG (SEQ ID NO: 138) | |
| 139 | GTATCTGACCCAGTTACGCCAGTTTTAGAGCTAGAAA | 5′ pegRNA, |
| | TAGCAAGTTAAAATAAGGCTAGTCCGTTATCAACTTG | transcription |
| | AAAAAGTGGCACCGAGTCGGTGCGGCCTGGACGCCA | adaptation (5′G, |
| | GGCCTCGTAACTGGGTTTTTTT (SEQ ID NO: 139) | 3′TTTTTTT) |
| 140 | TATCTGACCCAGTTACGCCAGTTTTAGAGCTAGAAAT | 5′ pegRNA |
| | AGCAAGTTAAAATAAGGCTAGTCCGTTATCAACTTG | |
| | AAAAAGTGGCACCGAGTCGGTGCTGCCGCACGGCGG | |
| | CTCGTAACTGGG (SEQ ID NO: 140) | |
| 141 | GTATCTGACCCAGTTACGCCAGTTTTAGAGCTAGAAA | 5′ pegRNA, |
| | TAGCAAGTTAAAATAAGGCTAGTCCGTTATCAACTTG | transcription |
| | AAAAAGTGGCACCGAGTCGGTGCTGCCGCACGGCGG | adaptation (5′G, |
| | CTCGTAACTGGGTTTTTTT (SEQ ID NO: 141) | 3′TTTTTTT) |
| 142 | TATCTGACCCAGTTACGCCAGTTTTAGAGCTAGAAAT | 5′ pegRNA |
| | AGCAAGTTAAAATAAGGCTAGTCCGTTATCAACTTG | |
| | AAAAAGTGGCACCGAGTCGGTGCTTGGAGTTTGCTC | |
| | TGTGTATGACGTAACTGGG (SEQ ID NO: 142) | |
| 143 | GTATCTGACCCAGTTACGCCAGTTTTAGAGCTAGAAA | 5′ pegRNA, |
| | TAGCAAGTTAAAATAAGGCTAGTCCGTTATCAACTTG | transcription |
| | AAAAAGTGGCACCGAGTCGGTGCTTGGAGTTTGCTC | adaptation (5′G, |
| | TGTGTATGACGTAACTGGGTTTTTTT (SEQ ID NO: 143) | 3′TTTTTTT) |
| 144 | TATCTGACCCAGTTACGCCAGTTTTAGAGCTAGAAAT | 5′ pegRNA |
| | AGCAAGTTAAAATAAGGCTAGTCCGTTATCAACTTG | |
| | AAAAAGTGGCACCGAGTCGGTGCTTTACACTAGATG | |
| | GTGCTGTCGTAACTGGG (SEQ ID NO: 144) | |
| 145 | GTATCTGACCCAGTTACGCCAGTTTTAGAGCTAGAAA | 5′ pegRNA, |
| | TAGCAAGTTAAAATAAGGCTAGTCCGTTATCAACTTG | transcription |
| | AAAAAGTGGCACCGAGTCGGTGCTTTACACTAGATG | adaptation (5′G, |
| | GTGCTGTCGTAACTGGGTTTTTTT (SEQ ID NO: 145) | 3′TTTTTTT) |
| 146 | TATCTGACCCAGTTACGCCAGTTTTAGAGCTAGAAAT | 5′ pegRNA |
| | AGCAAGTTAAAATAAGGCTAGTCCGTTATCAACTTG | |
| | AAAAAGTGGCACCGAGTCGGTGCACTTCACATCCAG | |
| | TGACGAGCGTAACTGGG (SEQ ID NO: 146) | |
| 147 | GTATCTGACCCAGTTACGCCAGTTTTAGAGCTAGAAA | 5′ pegRNA, |
| | TAGCAAGTTAAAATAAGGCTAGTCCGTTATCAACTTG | transcription |
| | AAAAAGTGGCACCGAGTCGGTGCACTTCACATCCAG | adaptation (5′G, |
| | TGACGAGCGTAACTGGGTTTTTTT (SEQ ID NO: 147) | 3′TTTTTTT) |
| 148 | TATCTGACCCAGTTACGCCAGTTTTAGAGCTAGAAAT | 5′ pegRNA |
| | AGCAAGTTAAAATAAGGCTAGTCCGTTATCAACTTG | |
| | AAAAAGTGGCACCGAGTCGGTGCGCGGTATCACCTA | |
| | CGACATCAACGTAACTGGG (SEQ ID NO: 148) | |
| 149 | GTATCTGACCCAGTTACGCCAGTTTTAGAGCTAGAAA | 5′ pegRNA, |
| | TAGCAAGTTAAAATAAGGCTAGTCCGTTATCAACTTG | transcription |
| | AAAAAGTGGCACCGAGTCGGTGCGCGGTATCACCTA | adaptation (5′G, |
| | CGACATCAACGTAACTGGGTTTTTTT (SEQ ID NO: | 3′TTTTTTT) |
| | 149) | |
| 150 | TATCTGACCCAGTTACGCCAGTTTTAGAGCTAGAAAT | 5′ pegRNA |
| | AGCAAGTTAAAATAAGGCTAGTCCGTTATCAACTTG | |
| | AAAAAGTGGCACCGAGTCGGTGCCTGCCCCTGAGGG | |
| | ACGATCCCGTAACTGGG (SEQ ID NO: 150) | |
| 151 | GTATCTGACCCAGTTACGCCAGTTTTAGAGCTAGAAA | 5′ pegRNA, |
| | TAGCAAGTTAAAATAAGGCTAGTCCGTTATCAACTTG | transcription |
| | AAAAAGTGGCACCGAGTCGGTGCCTGCCCCTGAGGG | adaptation (5′G, |
| | ACGATCCCGTAACTGGGTTTTTTT (SEQ ID NO: 151) | 3′TTTTTTT) |
| 152 | TATCTGACCCAGTTACGCCAGTTTTAGAGCTAGAAAT | 5′ pegRNA |
| | AGCAAGTTAAAATAAGGCTAGTCCGTTATCAACTTG | |
| | AAAAAGTGGCACCGAGTCGGTGCGGGTCTGATGCCC | |
| | GAGACCACGACGTAACTGGG (SEQ ID NO: 152) | |
| 153 | GTATCTGACCCAGTTACGCCAGTTTTAGAGCTAGAAA | 5′ pegRNA, |
| | TAGCAAGTTAAAATAAGGCTAGTCCGTTATCAACTTG | transcription |
| | AAAAAGTGGCACCGAGTCGGTGCGGGTCTGATGCCC | adaptation (5′G, |
| | GAGACCACGACGTAACTGGGTTTTTTT (SEQ ID NO: | 3′TTTTTTT) |
| | 153) | |
| 154 | TATCTGACCCAGTTACGCCAGTTTTAGAGCTAGAAAT | 5′ pegRNA |
| | AGCAAGTTAAAATAAGGCTAGTCCGTTATCAACTTG | |
| | AAAAAGTGGCACCGAGTCGGTGCGCCCCACGGGCCG | |
| | AGTGCGGCGTAACTGGG (SEQ ID NO: 154) | |
| 155 | GTATCTGACCCAGTTACGCCAGTTTTAGAGCTAGAAA | 5′ pegRNA, |
| | TAGCAAGTTAAAATAAGGCTAGTCCGTTATCAACTTG | transcription |
| | AAAAAGTGGCACCGAGTCGGTGCGCCCCACGGGCCG | adaptation (5′G, |
| | AGTGCGGCGTAACTGGGTTTTTTT (SEQ ID NO: 155) | 3′TTTTTTT) |
| 156 | TATCTGACCCAGTTACGCCAGTTTTAGAGCTAGAAAT | 5′ pegRNA |
| | AGCAAGTTAAAATAAGGCTAGTCCGTTATCAACTTG | |
| | AAAAAGTGGCACCGAGTCGGTGCTAACTGCTCTATA | |
| | TACGAGATTATCAAATCCGTAACTGGG (SEQ ID NO: | |
| | 156) | |
| 157 | GTATCTGACCCAGTTACGCCAGTTTTAGAGCTAGAAA | 5′ pegRNA, |
| | TAGCAAGTTAAAATAAGGCTAGTCCGTTATCAACTTG | transcription |
| | AAAAAGTGGCACCGAGTCGGTGCTAACTGCTCTATA | adaptation (5′G, |
| | TACGAGATTATCAAATCCGTAACTGGGTTTTTTT (SEQ | 3′TTTTTTT) |
| | ID NO: 157) | |
| 158 | TATCTGACCCAGTTACGCCAGTTTTAGAGCTAGAAAT | 5′ pegRNA |
| | AGCAAGTTAAAATAAGGCTAGTCCGTTATCAACTTG | |
| | AAAAAGTGGCACCGAGTCGGTGCGGTAACGTAATAC | |
| | AAGGAAACATGAGACACCGTAACTGGG (SEQ ID NO: | |
| | 158) | |
| 159 | GTATCTGACCCAGTTACGCCAGTTTTAGAGCTAGAAA | 5′ pegRNA, |
| | TAGCAAGTTAAAATAAGGCTAGTCCGTTATCAACTTG | transcription |
| | AAAAAGTGGCACCGAGTCGGTGCGGTAACGTAATAC | adaptation (5′G, |
| | AAGGAAACATGAGACACCGTAACTGGGTTTTTTT | 3′TTTTTTT) |
| | (SEQ ID NO: 159) | |
| 160 | TATCTGACCCAGTTACGCCAGTTTTAGAGCTAGAAAT | 5′ pegRNA |
| | AGCAAGTTAAAATAAGGCTAGTCCGTTATCAACTTG | |
| | AAAAAGTGGCACCGAGTCGGTGCCAAGTTGTGCCCC | |
| | TAGTGAGCTTGGATTACCGTAACTGGG (SEQ ID NO: | |
| | 160) | |
| 161 | GTATCTGACCCAGTTACGCCAGTTTTAGAGCTAGAAA | 5′ pegRNA, |
| | TAGCAAGTTAAAATAAGGCTAGTCCGTTATCAACTTG | transcription |
| | AAAAAGTGGCACCGAGTCGGTGCCAAGTTGTGCCCC | adaptation (5′G, |
| | TAGTGAGCTTGGATTACCGTAACTGGGTTTTTTT (SEQ | 3′TTTTTTT) |
| | ID NO: 161) | |
| 162 | TATCTGACCCAGTTACGCCAGTTTTAGAGCTAGAAAT | 5′ pegRNA |
| | AGCAAGTTAAAATAAGGCTAGTCCGTTATCAACTTG | |
| | AAAAAGTGGCACCGAGTCGGTGCGCGCGAACCTGGG | |
| | ATCGCCATGCATGATAGCGTAACTGGG (SEQ ID NO: | |
| | 162) | |
| 163 | GTATCTGACCCAGTTACGCCAGTTTTAGAGCTAGAAA | 5′ pegRNA, |
| | TAGCAAGTTAAAATAAGGCTAGTCCGTTATCAACTTG | transcription |
| | AAAAAGTGGCACCGAGTCGGTGCGCGCGAACCTGGG | adaptation (5′G, |
| | ATCGCCATGCATGATAGCGTAACTGGGTTTTTTT | 3′TTTTTTT) |
| | (SEQ ID NO: 163) | |
| 164 | TATCTGACCCAGTTACGCCAGTTTTAGAGCTAGAAAT | 5′ pegRNA |
| | AGCAAGTTAAAATAAGGCTAGTCCGTTATCAACTTG | |
| | AAAAAGTGGCACCGAGTCGGTGCATGATCCTGACGA | |
| | CGGAGACCGCCGTCGTCGACAAGCCCGTAACTGGG | |
| | (SEQ ID NO: 164) | |
| 165 | GTATCTGACCCAGTTACGCCAGTTTTAGAGCTAGAAA | 5′ pegRNA, |
| | TAGCAAGTTAAAATAAGGCTAGTCCGTTATCAACTTG | transcription |
| | AAAAAGTGGCACCGAGTCGGTGCATGATCCTGACGA | adaptation (5′G, |
| | CGGAGACCGCCGTCGTCGACAAGCCCGTAACTGGGT | 3′TTTTTTT) |
| | TTTTTT (SEQ ID NO: 165) | |
| 166 | TATCTGACCCAGTTACGCCAGTTTTAGAGCTAGAAAT | 5′ pegRNA |
| | AGCAAGTTAAAATAAGGCTAGTCCGTTATCAACTTG | |
| | AAAAAGTGGCACCGAGTCGGTGCAAAACTCTGCTGA | |
| | TGGCCAGCGTAACTGGGT (SEQ ID NO: 166) | |
| 167 | GTATCTGACCCAGTTACGCCAGTTTTAGAGCTAGAAA | 5′ pegRNA, |
| | TAGCAAGTTAAAATAAGGCTAGTCCGTTATCAACTTG | transcription |
| | AAAAAGTGGCACCGAGTCGGTGCAAAACTCTGCTGA | adaptation (5′G, |
| | TGGCCAGCGTAACTGGGTTTTTTTT (SEQ ID NO: 167) | 3′TTTTTTT) |
| 168 | TATCTGACCCAGTTACGCCAGTTTTAGAGCTAGAAAT | 5′ pegRNA |
| | AGCAAGTTAAAATAAGGCTAGTCCGTTATCAACTTG | |
| | AAAAAGTGGCACCGAGTCGGTGCAAAACTCTGCTGA | |
| | TGGCCAGCGTAACTGGGTCA (SEQ ID NO: 168) | |
| 169 | GTATCTGACCCAGTTACGCCAGTTTTAGAGCTAGAAA | 5′ pegRNA, |
| | TAGCAAGTTAAAATAAGGCTAGTCCGTTATCAACTTG | transcription |
| | AAAAAGTGGCACCGAGTCGGTGCAAAACTCTGCTGA | adaptation (5′G, |
| | TGGCCAGCGTAACTGGGTCATTTTTTT (SEQ ID NO: | 3′TTTTTTT) |
| | 169) | |
| 170 | TATCTGACCCAGTTACGCCAGTTTTAGAGCTAGAAAT | 5′ pegRNA |
| | AGCAAGTTAAAATAAGGCTAGTCCGTTATCAACTTG | |
| | AAAAAGTGGCACCGAGTCGGTGCAATTAAAAACTCT | |
| | GCTGATGGCCAGCGTAACTGGGT (SEQ ID NO: 170) | |
| 171 | GTATCTGACCCAGTTACGCCAGTTTTAGAGCTAGAAA | 5′ pegRNA, |
| | TAGCAAGTTAAAATAAGGCTAGTCCGTTATCAACTTG | transcription |
| | AAAAAGTGGCACCGAGTCGGTGCAATTAAAAACTCT | adaptation (5′G, |
| | GCTGATGGCCAGCGTAACTGGGTTTTTTTT (SEQ ID | 3′TTTTTTT) |
| | NO: 171) | |
| 172 | TATCTGACCCAGTTACGCCAGTTTTAGAGCTAGAAAT | 5′ pegRNA |
| | AGCAAGTTAAAATAAGGCTAGTCCGTTATCAACTTG | |
| | AAAAAGTGGCACCGAGTCGGTGCAATTAAAAACTCT | |
| | GCTGATGGCCAGCGTAACTGGGTCA (SEQ ID NO: 172) | |
| 173 | GTATCTGACCCAGTTACGCCAGTTTTAGAGCTAGAAA | 5′ pegRNA, |
| | TAGCAAGTTAAAATAAGGCTAGTCCGTTATCAACTTG | transcription |
| | AAAAAGTGGCACCGAGTCGGTGCAATTAAAAACTCT | adaptation (5′G, |
| | GCTGATGGCCAGCGTAACTGGGTCATTTTTTT (SEQ | 3′TTTTTTT) |
| | ID NO: 173) | |
| 174 | TATCTGACCCAGTTACGCCAGTTTTAGAGCTAGAAAT | 5′ pegRNA |
| | AGCAAGTTAAAATAAGGCTAGTCCGTTATCAACTTG | |
| | AAAAAGTGGCACCGAGTCGGTGCTCCTAAATTAAAA | |
| | ACTCTGCTGATGGCCAGCGTAACTGGGT (SEQ ID NO: | |
| | 174) | |
| 175 | GTATCTGACCCAGTTACGCCAGTTTTAGAGCTAGAAA | 5′ pegRNA, |
| | TAGCAAGTTAAAATAAGGCTAGTCCGTTATCAACTTG | transcription |
| | AAAAAGTGGCACCGAGTCGGTGCTCCTAAATTAAAA | adaptation (5′G, |
| | ACTCTGCTGATGGCCAGCGTAACTGGGTTTTTTTT | 3′TTTTTTT) |
| | (SEQ ID NO: 175) | |
| 176 | TATCTGACCCAGTTACGCCAGTTTTAGAGCTAGAAAT | 5′ pegRNA |
| | AGCAAGTTAAAATAAGGCTAGTCCGTTATCAACTTG | |
| | AAAAAGTGGCACCGAGTCGGTGCTCCTAAATTAAAA | |
| | ACTCTGCTGATGGCCAGCGTAACTGGGTCA (SEQ ID | |
| | NO: 176) | |
| 177 | GTATCTGACCCAGTTACGCCAGTTTTAGAGCTAGAAA | 5′ pegRNA, |
| | TAGCAAGTTAAAATAAGGCTAGTCCGTTATCAACTTG | transcription |
| | AAAAAGTGGCACCGAGTCGGTGCTCCTAAATTAAAA | adaptation (5′G, |
| | ACTCTGCTGATGGCCAGCGTAACTGGGTCATTTTTTT | 3′TTTTTTT) |
| | (SEQ ID NO: 177) | |
| 178 | TATCTGACCCAGTTACGCCAGTTTTAGAGCTAGAAAT | 5′ pegRNA |
| | AGCAAGTTAAAATAAGGCTAGTCCGTTATCAACTTG | |
| | AAAAAGTGGCACCGAGTCGGTGCGGGGTGAAGACA | |
| | AGGGCCTCCGTAACTGGGT (SEQ ID NO: 178) | |
| 179 | GTATCTGACCCAGTTACGCCAGTTTTAGAGCTAGAAA | 5′ pegRNA, |
| | TAGCAAGTTAAAATAAGGCTAGTCCGTTATCAACTTG | transcription |
| | AAAAAGTGGCACCGAGTCGGTGCGGGGTGAAGACA | adaptation (5′G, |
| | AGGGCCTCCGTAACTGGGTTTTTTTT (SEQ ID NO: 179) | 3′TTTTTTT) |
| 180 | TATCTGACCCAGTTACGCCAGTTTTAGAGCTAGAAAT | 5′ pegRNA |
| | AGCAAGTTAAAATAAGGCTAGTCCGTTATCAACTTG | |
| | AAAAAGTGGCACCGAGTCGGTGCGGGGTGAAGACA | |
| | AGGGCCTCCGTAACTGGGTCA (SEQ ID NO: 180) | |
| 181 | GTATCTGACCCAGTTACGCCAGTTTTAGAGCTAGAAA | 5′ pegRNA, |
| | TAGCAAGTTAAAATAAGGCTAGTCCGTTATCAACTTG | transcription |
| | AAAAAGTGGCACCGAGTCGGTGCGGGGTGAAGACA | adaptation (5′G, |
| | AGGGCCTCCGTAACTGGGTCATTTTTTT (SEQ ID NO: | 3′TTTTTTT) |
| | 181) | |
| 182 | TATCTGACCCAGTTACGCCAGTTTTAGAGCTAGAAAT | 5′ pegRNA |
| | AGCAAGTTAAAATAAGGCTAGTCCGTTATCAACTTG | |
| | AAAAAGTGGCACCGAGTCGGTGCGTGATGGGGTGAA | |
| | GACAAGGGCCTCCGTAACTGGGT (SEQ ID NO: 182) | |
| 183 | GTATCTGACCCAGTTACGCCAGTTTTAGAGCTAGAAA | 5′ pegRNA, |
| | TAGCAAGTTAAAATAAGGCTAGTCCGTTATCAACTTG | transcription |
| | AAAAAGTGGCACCGAGTCGGTGCGTGATGGGGTGAA | adaptation (5′G, |
| | GACAAGGGCCTCCGTAACTGGGTTTTTTTT (SEQ ID | 3′TTTTTTT) |
| | NO: 183) | |
| 184 | TATCTGACCCAGTTACGCCAGTTTTAGAGCTAGAAAT | 5′ pegRNA |
| | AGCAAGTTAAAATAAGGCTAGTCCGTTATCAACTTG | |
| | AAAAAGTGGCACCGAGTCGGTGCGTGATGGGGTGAA | |
| | GACAAGGGCCTCCGTAACTGGGTCA (SEQ ID NO: 184) | |
| 185 | GTATCTGACCCAGTTACGCCAGTTTTAGAGCTAGAAA | 5′ pegRNA, |
| | TAGCAAGTTAAAATAAGGCTAGTCCGTTATCAACTTG | transcription |
| | AAAAAGTGGCACCGAGTCGGTGCGTGATGGGGTGAA | adaptation (5′G, |
| | GACAAGGGCCTCCGTAACTGGGTCATTTTTTT (SEQ | 3′TTTTTTT) |
| | ID NO: 185) | |
| 186 | TATCTGACCCAGTTACGCCAGTTTTAGAGCTAGAAAT | 5′ pegRNA |
| | AGCAAGTTAAAATAAGGCTAGTCCGTTATCAACTTG | |
| | AAAAAGTGGCACCGAGTCGGTGCGGGCAGTGATGGG | |
| | GTGAAGACAAGGGCCTCCGTAACTGGGT (SEQ ID NO: | |
| | 186) | |
| 187 | GTATCTGACCCAGTTACGCCAGTTTTAGAGCTAGAAA | 5′ pegRNA, |
| | TAGCAAGTTAAAATAAGGCTAGTCCGTTATCAACTTG | transcription |
| | AAAAAGTGGCACCGAGTCGGTGCGGGCAGTGATGGG | adaptation (5′G, |
| | GTGAAGACAAGGGCCTCCGTAACTGGGTTTTTTTT | 3′TTTTTTT) |
| | (SEQ ID NO: 187) | |
| 188 | TATCTGACCCAGTTACGCCAGTTTTAGAGCTAGAAAT | 5′ pegRNA |
| | AGCAAGTTAAAATAAGGCTAGTCCGTTATCAACTTG | |
| | AAAAAGTGGCACCGAGTCGGTGCGGGCAGTGATGGG | |
| | GTGAAGACAAGGGCCTCCGTAACTGGGTCA (SEQ ID | |
| | NO: 188) | |
| 189 | GTATCTGACCCAGTTACGCCAGTTTTAGAGCTAGAAA | 5′ pegRNA, |
| | TAGCAAGTTAAAATAAGGCTAGTCCGTTATCAACTTG | transcription |
| | AAAAAGTGGCACCGAGTCGGTGCGGGCAGTGATGGG | adaptation (5′G, |
| | GTGAAGACAAGGGCCTCCGTAACTGGGTCATTTTTTT | 3′TTTTTTT) |
| | (SEQ ID NO: 189) | |
| 190 | TATCTGACCCAGTTACGCCAGTTTTAGAGCTAGAAAT | 5′ pegRNA |
| | AGCAAGTTAAAATAAGGCTAGTCCGTTATCAACTTG | |
| | AAAAAGTGGCACCGAGTCGGTGCCTGGCCCCAGAGT | |
| | CTGTGCACGTAACTGGGT (SEQ ID NO: 190) | |
| 191 | GTATCTGACCCAGTTACGCCAGTTTTAGAGCTAGAAA | 5′ pegRNA, |
| | TAGCAAGTTAAAATAAGGCTAGTCCGTTATCAACTTG | transcription |
| | AAAAAGTGGCACCGAGTCGGTGCCTGGCCCCAGAGT | adaptation (5′G, |
| | CTGTGCACGTAACTGGGTTTTTTTT (SEQ ID NO: 191) | 3′TTTTTTT) |
| 192 | TATCTGACCCAGTTACGCCAGTTTTAGAGCTAGAAAT | 5′ pegRNA |
| | AGCAAGTTAAAATAAGGCTAGTCCGTTATCAACTTG | |
| | AAAAAGTGGCACCGAGTCGGTGCCTGGCCCCAGAGT | |
| | CTGTGCACGTAACTGGGTCA (SEQ ID NO: 192) | |
| 193 | GTATCTGACCCAGTTACGCCAGTTTTAGAGCTAGAAA | 5′ pegRNA, |
| | TAGCAAGTTAAAATAAGGCTAGTCCGTTATCAACTTG | transcription |
| | AAAAAGTGGCACCGAGTCGGTGCCTGGCCCCAGAGT | adaptation (5′G, |
| | CTGTGCACGTAACTGGGTCATTTTTTT (SEQ ID NO: | 3′TTTTTTT) |
| | 193) | |
| 194 | TATCTGACCCAGTTACGCCAGTTTTAGAGCTAGAAAT | 5′ pegRNA |
| | AGCAAGTTAAAATAAGGCTAGTCCGTTATCAACTTG | |
| | AAAAAGTGGCACCGAGTCGGTGCGCTGTCTGGCCCC | |
| | AGAGTCTGTGCACGTAACTGGGT (SEQ ID NO: 194) | |
| 195 | GTATCTGACCCAGTTACGCCAGTTTTAGAGCTAGAAA | 5′ pegRNA, |
| | TAGCAAGTTAAAATAAGGCTAGTCCGTTATCAACTTG | transcription |
| | AAAAAGTGGCACCGAGTCGGTGCGCTGTCTGGCCCC | adaptation (5′G, |
| | AGAGTCTGTGCACGTAACTGGGTTTTTTTT (SEQ ID | 3′TTTTTTT) |
| | NO: 195) | |
| 196 | TATCTGACCCAGTTACGCCAGTTTTAGAGCTAGAAAT | 5′ pegRNA |
| | AGCAAGTTAAAATAAGGCTAGTCCGTTATCAACTTG | |
| | AAAAAGTGGCACCGAGTCGGTGCGCTGTCTGGCCCC | |
| | AGAGTCTGTGCACGTAACTGGGTCA (SEQ ID NO: 196) | |
| 197 | GTATCTGACCCAGTTACGCCAGTTTTAGAGCTAGAAA | 5′ pegRNA, |
| | TAGCAAGTTAAAATAAGGCTAGTCCGTTATCAACTTG | transcription |
| | AAAAAGTGGCACCGAGTCGGTGCGCTGTCTGGCCCC | adaptation (5′G, |
| | AGAGTCTGTGCACGTAACTGGGTCATTTTTTT (SEQ ID | 3′TTTTTTT) |
| | NO: 197) | |
| 198 | TATCTGACCCAGTTACGCCAGTTTTAGAGCTAGAAAT | 5′ pegRNA |
| | AGCAAGTTAAAATAAGGCTAGTCCGTTATCAACTTG | |
| | AAAAAGTGGCACCGAGTCGGTGCCCCAAGCTGTCTG | |
| | GCCCCAGAGTCTGTGCACGTAACTGGGT (SEQ ID NO: | |
| | 198) | |
| 199 | GTATCTGACCCAGTTACGCCAGTTTTAGAGCTAGAAA | 5′ pegRNA, |
| | TAGCAAGTTAAAATAAGGCTAGTCCGTTATCAACTTG | transcription |
| | AAAAAGTGGCACCGAGTCGGTGCCCCAAGCTGTCTG | adaptation (5′G, |
| | GCCCCAGAGTCTGTGCACGTAACTGGGTTTTTTTT | 3′TTTTTTT) |
| | (SEQ ID NO: 199) | |
| 200 | TATCTGACCCAGTTACGCCAGTTTTAGAGCTAGAAAT | 5′ pegRNA |
| | AGCAAGTTAAAATAAGGCTAGTCCGTTATCAACTTG | |
| | AAAAAGTGGCACCGAGTCGGTGCCCCAAGCTGTCTG | |
| | GCCCCAGAGTCTGTGCACGTAACTGGGTCA (SEQ ID | |
| | NO: 200) | |
| 201 | GTATCTGACCCAGTTACGCCAGTTTTAGAGCTAGAAA | 5′ pegRNA, |
| | TAGCAAGTTAAAATAAGGCTAGTCCGTTATCAACTTG | transcription |
| | AAAAAGTGGCACCGAGTCGGTGCCCCAAGCTGTCTG | adaptation (5′G, |
| | GCCCCAGAGTCTGTGCACGTAACTGGGTCATTTTTTT | 3′TTTTTTT) |
| | (SEQ ID NO: 201) | |
| 202 | TATCTGACCCAGTTACGCCAGTTTTAGAGCTAGAAAT | 5′ pegRNA |
| | AGCAAGTTAAAATAAGGCTAGTCCGTTATCAACTTG | |
| | AAAAAGTGGCACCGAGTCGGTGCGGCTTGTCGACGA | |
| | CGGCGGTCTCCGTCGTCAGGATCATCGTAACTG (SEQ | |
| | ID NO: 202) | |
| 203 | GTATCTGACCCAGTTACGCCAGTTTTAGAGCTAGAAA | 5′ pegRNA, |
| | TAGCAAGTTAAAATAAGGCTAGTCCGTTATCAACTTG | transcription |
| | AAAAAGTGGCACCGAGTCGGTGCGGCTTGTCGACGA | adaptation (5′G, |
| | CGGCGGTCTCCGTCGTCAGGATCATCGTAACTGTTTT | 3′TTTTTTT) |
| | TTT (SEQ ID NO: 203) | |
| 204 | TATCTGACCCAGTTACGCCAGTTTTAGAGCTAGAAAT | 5′ pegRNA |
| | AGCAAGTTAAAATAAGGCTAGTCCGTTATCAACTTG | |
| | AAAAAGTGGCACCGAGTCGGTGCGGCTTGTCGACGA | |
| | CGGCGGTCTCCGTCGTCAGGATCATCGTAACTGG | |
| | (SEQ ID NO: 204) | |
| 205 | GTATCTGACCCAGTTACGCCAGTTTTAGAGCTAGAAA | 5′ pegRNA, |
| | TAGCAAGTTAAAATAAGGCTAGTCCGTTATCAACTTG | transcription |
| | AAAAAGTGGCACCGAGTCGGTGCGGCTTGTCGACGA | adaptation (5′G, |
| | CGGCGGTCTCCGTCGTCAGGATCATCGTAACTGGTTT | 3′TTTTTTT) |
| | TTTT (SEQ ID NO: 205) | |
| 206 | TATCTGACCCAGTTACGCCAGTTTTAGAGCTAGAAAT | 5′ pegRNA |
| | AGCAAGTTAAAATAAGGCTAGTCCGTTATCAACTTG | |
| | AAAAAGTGGCACCGAGTCGGTGCGGCTTGTCGACGA | |
| | CGGCGGTCTCCGTCGTCAGGATCATCGTAACTGGGT | |
| | (SEQ ID NO: 206) | |
| 207 | GTATCTGACCCAGTTACGCCAGTTTTAGAGCTAGAAA | 5′ pegRNA, |
| | TAGCAAGTTAAAATAAGGCTAGTCCGTTATCAACTTG | transcription |
| | AAAAAGTGGCACCGAGTCGGTGCGGCTTGTCGACGA | adaptation (5′G, |
| | CGGCGGTCTCCGTCGTCAGGATCATCGTAACTGGGTT | 3′TTTTTTT) |
| | TTTTTT (SEQ ID NO: 207) | |
| 208 | TATCTGACCCAGTTACGCCAGTTTTAGAGCTAGAAAT | 5′ pegRNA |
| | AGCAAGTTAAAATAAGGCTAGTCCGTTATCAACTTG | |
| | AAAAAGTGGCACCGAGTCGGTGCGGCTTGTCGACGA | |
| | CGGCGGTCTCCGTCGTCAGGATCATCGTAACTGGGTC | |
| | A (SEQ ID NO: 208) | |
| 209 | GTATCTGACCCAGTTACGCCAGTTTTAGAGCTAGAAA | 5′ pegRNA, |
| | TAGCAAGTTAAAATAAGGCTAGTCCGTTATCAACTTG | transcription |
| | AAAAAGTGGCACCGAGTCGGTGCGGCTTGTCGACGA | adaptation (5′G, |
| | CGGCGGTCTCCGTCGTCAGGATCATCGTAACTGGGTC | 3′TTTTTTT) |
| | ATTTTTTT (SEQ ID NO: 209) | |
| 210 | TATCTGACCCAGTTACGCCAGTTTTAGAGCTAGAAAT | 5′ pegRNA |
| | AGCAAGTTAAAATAAGGCTAGTCCGTTATCAACTTG | |
| | AAAAAGTGGCACCGAGTCGGTGCGGCTTGTCGACGA | |
| | CGGCGGTCTCCGTCGTCAGGATCATCGTAACTGGGTC | |
| | AG (SEQ ID NO: 210) | |
| 211 | GTATCTGACCCAGTTACGCCAGTTTTAGAGCTAGAAA | 5′ pegRNA, |
| | TAGCAAGTTAAAATAAGGCTAGTCCGTTATCAACTTG | transcription |
| | AAAAAGTGGCACCGAGTCGGTGCGGCTTGTCGACGA | adaptation (5′G, |
| | CGGCGGTCTCCGTCGTCAGGATCATCGTAACTGGGTC | 3′TTTTTTT) |
| | AGTTTTTTT (SEQ ID NO: 211) | |
| 212 | TATCTGACCCAGTTACGCCAGTTTTAGAGCTAGAAAT | 5′ pegRNA |
| | AGCAAGTTAAAATAAGGCTAGTCCGTTATCAACTTG | |
| | AAAAAGTGGCACCGAGTCGGTGCGGCTTGTCGACGA | |
| | CGGCGGTCTCCGTCGTCAGGATCATCGTAACTGGGTC | |
| | AGA (SEQ ID NO: 212) | |
| 213 | GTATCTGACCCAGTTACGCCAGTTTTAGAGCTAGAAA | 5′ pegRNA, |
| | TAGCAAGTTAAAATAAGGCTAGTCCGTTATCAACTTG | transcription |
| | AAAAAGTGGCACCGAGTCGGTGCGGCTTGTCGACGA | adaptation (5′G, |
| | CGGCGGTCTCCGTCGTCAGGATCATCGTAACTGGGTC | 3′TTTTTTT) |
| | AGATTTTTTT (SEQ ID NO: 213) | |
| 214 | TATCTGACCCAGTTACGCCAGTTTTAGAGCTAGAAAT | 5′ pegRNA |
| | AGCAAGTTAAAATAAGGCTAGTCCGTTATCAACTTG | |
| | AAAAAGTGGCACCGAGTCGGTGCGGCTTGTCGACGA | |
| | CGGCGGTCTCCGTCGTCAGGATCATCGTAACTGGGTC | |
| | AGAT (SEQ ID NO: 214) | |
| 215 | GTATCTGACCCAGTTACGCCAGTTTTAGAGCTAGAAA | 5′ pegRNA, |
| | TAGCAAGTTAAAATAAGGCTAGTCCGTTATCAACTTG | transcription |
| | AAAAAGTGGCACCGAGTCGGTGCGGCTTGTCGACGA | adaptation (5′G, |
| | CGGCGGTCTCCGTCGTCAGGATCATCGTAACTGGGTC | 3′TTTTTTT) |
| | AGATTTTTTTT (SEQ ID NO: 215) | |
| 216 | TATCTGACCCAGTTACGCCAGTTTTAGAGCTAGAAAT | 5′ pegRNA |
| | AGCAAGTTAAAATAAGGCTAGTCCGTTATCAACTTG | |
| | AAAAAGTGGCACCGAGTCGGTGCGGCTTGTCGACGA | |
| | CGGCGGTCTCCGTCGTCAGGATCATCGTAACTGGGTC | |
| | AGATA (SEQ ID NO: 216) | |
| 217 | GTATCTGACCCAGTTACGCCAGTTTTAGAGCTAGAAA | 5′ pegRNA, |
| | TAGCAAGTTAAAATAAGGCTAGTCCGTTATCAACTTG | transcription |
| | AAAAAGTGGCACCGAGTCGGTGCGGCTTGTCGACGA | adaptation (5′G, |
| | CGGCGGTCTCCGTCGTCAGGATCATCGTAACTGGGTC | 3′TTTTTTT) |
| | AGATATTTTTTT (SEQ ID NO: 217) | |
| 218 | TATCTGACCCAGTTACGCCAGTTTAAGAGCGGGGAA | 5′ pegRNA, gRNA |
| | ATCCGCAAGTTTAAATAAGGCTAGTCCGTTATCAGCG | core SEQ ID NO: |
| | TGAAAACGCGGCACCGAGTCGGTGCGGCTTGTCGAC | 2259 |
| | GACGGCGGTCTCCGTCGTCAGGATCATCGTAACTGG | |
| | GTC (SEQ ID NO: 218) | |
| 219 | GTATCTGACCCAGTTACGCCAGTTTAAGAGCGGGGA | 5′ pegRNA, |
| | AATCCGCAAGTTTAAATAAGGCTAGTCCGTTATCAGC | transcription |
| | GTGAAAACGCGGCACCGAGTCGGTGCGGCTTGTCGA | adaptation (5′G, |
| | CGACGGCGGTCTCCGTCGTCAGGATCATCGTAACTG | 3′TTTTTTT), gRNA |
| | GGTCTTTTTTT (SEQ ID NO: 219) | core SEQ ID NO: |
| | | 2259 |
| 220 | TATCTGACCCAGTTACGCCAGTTTTAGAGCTAGAAAT | 5′ pegRNA, linker |
| | AGCAAGTTAAAATAAGGCTAGTCCGTTATCAACTTG | sequence number |
| | AAAAAGTGGCACCGAGTCGGTGCGGCTTGTCGACGA | 2243, 3′ motif SEQ |
| | CGGCGGTCTCCGTCGTCAGGATCATCGTAACTGGGTC | ID NO: 2237 |
| | TCTGTCCGCGGTTCTATCTAGTTACGCGTTAAACCAA | |
| | CTAGAA (SEQ ID NO: 220) | |
| 221 | GTATCTGACCCAGTTACGCCAGTTTTAGAGCTAGAAA | 5′ pegRNA, linker |
| | TAGCAAGTTAAAATAAGGCTAGTCCGTTATCAACTTG | sequence number |
| | AAAAAGTGGCACCGAGTCGGTGCGGCTTGTCGACGA | 2243, 3′ motif SEQ |
| | CGGCGGTCTCCGTCGTCAGGATCATCGTAACTGGGTC | ID NO: 2237, |
| | TCTGTCCGCGGTTCTATCTAGTTACGCGTTAAACCAA | transcription |
| | CTAGAATTTTTTT (SEQ ID NO: 221) | adaptation (5′G, |
| | | 3′TTTTTTT) |
| 222 | TATCTGACCCAGTTACGCCAGTTTTAGAGCTAGAAAT | 5′ pegRNA, linker |
| | AGCAAGTTAAAATAAGGCTAGTCCGTTATCAACTTG | sequence number |
| | AAAAAGTGGCACCGAGTCGGTGCGGCTTGTCGACGA | 2250, 3′ motif SEQ |
| | CGGCGGTCTCCGTCGTCAGGATCATCGTAACTGGGTC | ID NO: 2237 |
| | CCCCCCCGCGGTTCTATCTAGTTACGCGTTAAACCAA | |
| | CTAGAA (SEQ ID NO: 222) | |
| 223 | GTATCTGACCCAGTTACGCCAGTTTTAGAGCTAGAAA | 5′ pegRNA, linker |
| | TAGCAAGTTAAAATAAGGCTAGTCCGTTATCAACTTG | sequence number |
| | AAAAAGTGGCACCGAGTCGGTGCGGCTTGTCGACGA | 2250, 3′ motif SEQ |
| | CGGCGGTCTCCGTCGTCAGGATCATCGTAACTGGGTC | ID NO: 2237, |
| | CCCCCCCGCGGTTCTATCTAGTTACGCGTTAAACCAA | transcription |
| | CTAGAATTTTTTT (SEQ ID NO: 223) | adaptation (5′G, |
| | | 3′TTTTTTT) |
| 224 | TATCTGACCCAGTTACGCCAGTTTAAGAGCGGGGAA | 5′ pegRNA, linker |
| | ATCCGCAAGTTTAAATAAGGCTAGTCCGTTATCAGCG | sequence number |
| | TGAAAACGCGGCACCGAGTCGGTGCGGCTTGTCGAC | 2243, 3′ motif SEQ |
| | GACGGCGGTCTCCGTCGTCAGGATCATCGTAACTGG | ID NO: 2237, gRNA |
| | GTCTCTGTCCGCGGTTCTATCTAGTTACGCGTTAAAC | core SEQ ID NO: |
| | CAACTAGAA (SEQ ID NO: 224) | 2259 |
| 225 | GTATCTGACCCAGTTACGCCAGTTTAAGAGCGGGGA | 5′ pegRNA, linker |
| | AATCCGCAAGTTTAAATAAGGCTAGTCCGTTATCAGC | sequence number |
| | GTGAAAACGCGGCACCGAGTCGGTGCGGCTTGTCGA | 2243, 3′ motif SEQ |
| | CGACGGCGGTCTCCGTCGTCAGGATCATCGTAACTG | ID NO: 2237, |
| | GGTCTCTGTCCGCGGTTCTATCTAGTTACGCGTTAAA | transcription |
| | CCAACTAGAATTTTTTT (SEQ ID NO: 225) | adaptation (5′G, |
| | | 3′TTTTTTT), gRNA |
| | | core SEQ ID NO: |
| | | 2259 |
| 226 | TATCTGACCCAGTTACGCCAGTTTAAGAGCGGGGAA | 5′ pegRNA, linker |
| | ATCCGCAAGTTTAAATAAGGCTAGTCCGTTATCAGCG | sequence number |
| | TGAAAACGCGGCACCGAGTCGGTGCGGCTTGTCGAC | 2245, 3′ motif SEQ |
| | GACGGCGGTCTCCGTCGTCAGGATCATCGTAACTGG | ID NO: 2237, gRNA |
| | GTCTCCCTCCGCGGTTCTATCTAGTTACGCGTTAAAC | core SEQ ID NO: |
| | CAACTAGAA (SEQ ID NO: 226) | 2259 |
| 227 | GTATCTGACCCAGTTACGCCAGTTTAAGAGCGGGGA | 5′ pegRNA, linker |
| | AATCCGCAAGTTTAAATAAGGCTAGTCCGTTATCAGC | sequence number |
| | GTGAAAACGCGGCACCGAGTCGGTGCGGCTTGTCGA | 2245, 3′ motif SEQ |
| | CGACGGCGGTCTCCGTCGTCAGGATCATCGTAACTG | ID NO: 2237, |
| | GGTCTCCCTCCGCGGTTCTATCTAGTTACGCGTTAAA | transcription |
| | CCAACTAGAATTTTTTT (SEQ ID NO: 227) | adaptation (5′G, |
| | | 3′TTTTTTT), gRNA |
| | | core SEQ ID NO: |
| | | 2259 |
| 228 | TATCTGACCCAGTTACGCCAGTTTAAGAGCGGGGAA | 5′ pegRNA, gRNA |
| | ATCCGCAAGTTTAAATAAGGCTAGTCCGTTATCAGCG | core SEQ ID NO: |
| | GGAAACCGCGGCACCGAGTCGGTGTGGCTTGTCGAC | 2263 |
| | GACGGCGGTCTCCGTCGTCAGGATCATCGTAACTGG | |
| | GTC (SEQ ID NO: 228) | |
| 229 | GTATCTGACCCAGTTACGCCAGTTTAAGAGCGGGGA | 5′ pegRNA, |
| | AATCCGCAAGTTTAAATAAGGCTAGTCCGTTATCAGC | transcription |
| | GGGAAACCGCGGCACCGAGTCGGTGTGGCTTGTCGA | adaptation (5′G, |
| | CGACGGCGGTCTCCGTCGTCAGGATCATCGTAACTG | 3′TTTTTTT), gRNA |
| | GGTCTTTTTTT (SEQ ID NO: 229) | core SEQ ID NO: |
| | | 2263 |
| 230 | TATCTGACCCAGTTACGCCAGTTTAAAAGCGGGGAA | 5′ pegRNA, gRNA |
| | ATCCGCAAGTTTAAATAAGGCTAGTCCGTTATCAGCG | core SEQ ID NO: |
| | GGAAACCGCGGCACCAAGTTGGTGTGGCTTGTCGAC | 2264 |
| | GACGGCGGTCTCCGTCGTCAGGATCATCGTAACTGG | |
| | GTC (SEQ ID NO: 230) | |
| 231 | GTATCTGACCCAGTTACGCCAGTTTAAAAGCGGGGA | 5′ pegRNA, |
| | AATCCGCAAGTTTAAATAAGGCTAGTCCGTTATCAGC | transcription |
| | GGGAAACCGCGGCACCAAGTTGGTGTGGCTTGTCGA | adaptation (5′G, |
| | CGACGGCGGTCTCCGTCGTCAGGATCATCGTAACTG | 3′TTTTTTT), gRNA |
| | GGTCTTTTTTT (SEQ ID NO: 231) | core SEQ ID NO: |
| | | 2264 |
| 232 | TATCTGACCCAGTTACGCCAGTTTTAGAGCTAGAAAT | 5′ pegRNA, |
| | AGCAAGTTAAAATAAGGCTAGTCCGTTATCAACTTG | transcription |
| | AAAAAGTGGCACCGAGTCGGTGCGGCTTGTCGACGA | adaptation (3′ TTTT) |
| | CGGCGGTCTCCGTCGTCAGGATCATCGTAACTGGGTT | |
| | TT (SEQ ID NO: 232) | |
| 233 | TATCTGACCCAGTTACGCCAGTTTTAGAGCTAGAAAT | 5′ pegRNA, |
| | AGCAAGTTAAAATAAGGCTAGTCCGTTATCAACTTG | transcription |
| | AAAAAGTGGCACCGAGTCGGTGCGGCTTGTCGACGA | adaptation (3′ TTTT) |
| | CGGCGGTCTCCGTCGTCAGGATCATCGTAACTGGGTC | |
| | TTTT (SEQ ID NO: 233) | |
| 2522 | TATCTGACCCAGTTACGCCAGTTTTAGAGCTAGAAAT | 5′ pegRNA |
| | AGCAAGTTAAAATAAGGCTAGTCCGTTATCAACTTG | |
| | AAAAAGTGGCACCGAGTCGGTGCGATTTGCCGCCCC | |
| | TACTGACTCCTTCAACGACTCTGGGCGTAACTGGGTC | |
| 2523 | TATCTGACCCAGTTACGCCAGTTTTAGAGCTAGAAAT | 5′ pegRNA |
| | AGCAAGTTAAAATAAGGCTAGTCCGTTATCAACTTG | |
| | AAAAAGTGGCACCGAGTCGGTGCGCCGCCCCTACTG | |
| | ACTCCTTCAACGACTCTGGGCGTAACTGGGTC (SEQ | |
| | ID NO: 2523) | |
| 2524 | TATCTGACCCAGTTACGCCAGTTTTAGAGCTAGAAAT | 5′ pegRNA |
| | AGCAAGTTAAAATAAGGCTAGTCCGTTATCAACTTG | |
| | AAAAAGTGGCACCGAGTCGGTGCACACTCTTTGAGA | |
| | TTTGCCGCCCCTACTGACTCCTTCAACGACTCTGGGC | |
| | GTAACTGGGTC (SEQ ID NO: 2524) | |
| 2525 | TATCTGACCCAGTTACGCCAGTTTTAGAGCTAGAAAT | 5′ pegRNA |
| | AGCAAGTTAAAATAAGGCTAGTCCGTTATCAACTTG | |
| | AAAAAGTGGCACCGAGTCGGTGCTCTTTGAGATTTG | |
| | CCGCCCCTACTGACTCCTTCAACGACTCTGGGCGTAA | |
| | CTGGGTC (SEQ ID NO: 2525) | |
| 2526 | TATCTGACCCAGTTACGCCAGTTTTAGAGCTAGAAAT | 5′ pegRNA |
| | AGCAAGTTAAAATAAGGCTAGTCCGTTATCAACTTG | |
| | AAAAAGTGGCACCGAGTCGGTGCAGCACTGGGCCAC | |
| | ACTCTTTGAGATTTGCCGCCCCTACTGACTCCTTCAA | |
| | CGACTCTGGGCGTAACTGGGTC (SEQ ID NO: 2526) | |
| 2527 | TATCTGACCCAGTTACGCCAGTTTTAGAGCTAGAAAT | 5′ pegRNA |
| | AGCAAGTTAAAATAAGGCTAGTCCGTTATCAACTTG | |
| | AAAAAGTGGCACCGAGTCGGTGCTGGGCCACACTCT | |
| | TTGAGATTTGCCGCCCCTACTGACTCCTTCAACGACT | |
| | CTGGGCGTAACTGGGTC (SEQ ID NO: 2527) | |
| 2528 | TATCTGACCCAGTTACGCCAGTTTTAGAGCTAGAAAT | 5′ pegRNA |
| | AGCAAGTTAAAATAAGGCTAGTCCGTTATCAACTTG | |
| | AAAAAGTGGCACCGAGTCGGTGCGATTTGCCGCCCC | |
| | TACTGACTCCTTCAACGACTCTGGGCGTAACTGGGTC | |
| | A (SEQ ID NO: 2528) | |
| 2529 | TATCTGACCCAGTTACGCCAGTTTTAGAGCTAGAAAT | 5′ pegRNA |
| | AGCAAGTTAAAATAAGGCTAGTCCGTTATCAACTTG | |
| | AAAAAGTGGCACCGAGTCGGTGCGCCGCCCCTACTG | |
| | ACTCCTTCAACGACTCTGGGCGTAACTGGGTCA (SEQ | |
| | ID NO: 2529) | |
| 2530 | TATCTGACCCAGTTACGCCAGTTTTAGAGCTAGAAAT | 5′ pegRNA |
| | AGCAAGTTAAAATAAGGCTAGTCCGTTATCAACTTG | |
| | AAAAAGTGGCACCGAGTCGGTGCACACTCTTTGAGA | |
| | TTTGCCGCCCCTACTGACTCCTTCAACGACTCTGGGC | |
| | GTAACTGGGTCA (SEQ ID NO: 2530) | |
| 2531 | TATCTGACCCAGTTACGCCAGTTTTAGAGCTAGAAAT | 5′ pegRNA |
| | AGCAAGTTAAAATAAGGCTAGTCCGTTATCAACTTG | |
| | AAAAAGTGGCACCGAGTCGGTGCTCTTTGAGATTTG | |
| | CCGCCCCTACTGACTCCTTCAACGACTCTGGGCGTAA | |
| | CTGGGTCA (SEQ ID NO: 2531) | |
| 2532 | TATCTGACCCAGTTACGCCAGTTTTAGAGCTAGAAAT | 5′ pegRNA |
| | AGCAAGTTAAAATAAGGCTAGTCCGTTATCAACTTG | |
| | AAAAAGTGGCACCGAGTCGGTGCAGCACTGGGCCAC | |
| | ACTCTTTGAGATTTGCCGCCCCTACTGACTCCTTCAA | |
| | CGACTCTGGGCGTAACTGGGTCA (SEQ ID NO: 2532) | |
| 2533 | TATCTGACCCAGTTACGCCAGTTTTAGAGCTAGAAAT | 5′ pegRNA |
| | AGCAAGTTAAAATAAGGCTAGTCCGTTATCAACTTG | |
| | AAAAAGTGGCACCGAGTCGGTGCTGGGCCACACTCT | |
| | TTGAGATTTGCCGCCCCTACTGACTCCTTCAACGACT | |
| | CTGGGCGTAACTGGGTCA (SEQ ID NO: 2533) | |

TABLE 3
Exemplary 5′ PEgRNA and component sequence

| Sequence | | |
|---|---|---|
| number | Sequence | Description |
| 234 | GTGGTAGAGGGTGTTTCACG (SEQ ID NO: 234) | 5′ Spacer |
| 235 | GTAGAGGGTGTTTCACG (SEQ ID NO: 235) | 5′ Spacer |
| 236 | GGTAGAGGGTGTTTCACG (SEQ ID NO: 236) | 5′ Spacer |
| 237 | TGGTAGAGGGTGTTTCACG (SEQ ID NO: 237) | 5′ Spacer |
| 238 | AGTGGTAGAGGGTGTTTCACG (SEQ ID NO: 238) | 5′ Spacer |
| 239 | AAGTGGTAGAGGGTGTTTCACG (SEQ ID NO: 239) | 5′ Spacer |
| 240 | GAAAC | 5′ PBS |
| 241 | GAAACA | 5′ PBS |
| 242 | GAAACAC | 5′ PBS |
| 243 | GAAACACC | 5′ PBS |
| 244 | GAAACACCC | 5′ PBS |
| 245 | GAAACACCCT (SEQ ID NO: 245) | 5′ PBS |
| 246 | GAAACACCCTC (SEQ ID NO: 246) | 5′ PBS |
| 247 | GAAACACCCTCT (SEQ ID NO: 247) | 5′ PBS |
| 248 | GAAACACCCTCTA (SEQ ID NO: 248) | 5′ PBS |
| 249 | GAAACACCCTCTAC (SEQ ID NO: 249) | 5′ PBS |
| 250 | GAAACACCCTCTACC (SEQ ID NO: 250) | 5′ PBS |
| 251 | GAAACACCCTCTACCA (SEQ ID NO: 251) | 5′ PBS |
| 252 | GAAACACCCTCTACCAC (SEQ ID NO: 252) | 5′ PBS |
| 253 | GAAACACCCTCTACCACT (SEQ ID NO: 253) | 5′ PBS |
| 254 | GAAACACCCTCTACCACTT (SEQ ID NO: 254) | 5′ PBS |
| 255 | GTGGTAGAGGGTGTTTCACGGTTTTAGAGCTAGAAA | 5′ pegRNA |
| | TAGCAAGTTAAAATAAGGCTAGTCCGTTATCAACTTG | |
| | AAAAAGTGGCACCGAGTCGGTGCGGCTTGTCGACGA | |
| | CGGCGGTCTCCGTCGTCAGGATCATGAAACACCCT | |
| | (SEQ ID NO: 255) | |
| 256 | GTGGTAGAGGGTGTTTCACGGTTTTAGAGCTAGAAA | 5′ pegRNA, |
| | TAGCAAGTTAAAATAAGGCTAGTCCGTTATCAACTTG | transcription |
| | AAAAAGTGGCACCGAGTCGGTGCGGCTTGTCGACGA | adaptation |
| | CGGCGGTCTCCGTCGTCAGGATCATGAAACACCCTTT | (3′TTTTTTT) |
| | TTTTT (SEQ ID NO: 256) | |
| 257 | GTGGTAGAGGGTGTTTCACGGTTTTAGAGCTAGAAA | 5′ pegRNA |
| | TAGCAAGTTAAAATAAGGCTAGTCCGTTATCAACTTG | |
| | AAAAAGTGGCACCGAGTCGGTGCGGCTTGTCGACGA | |
| | CGGCGGTCTCCGTCGTCAGGATCATGAAACACCCTCT | |
| | (SEQ ID NO: 257) | |
| 258 | GTGGTAGAGGGTGTTTCACGGTTTTAGAGCTAGAAA | 5′ pegRNA, |
| | TAGCAAGTTAAAATAAGGCTAGTCCGTTATCAACTTG | transcription |
| | AAAAAGTGGCACCGAGTCGGTGCGGCTTGTCGACGA | adaptation |
| | CGGCGGTCTCCGTCGTCAGGATCATGAAACACCCTCT | (3′TTTTTTT) |
| | TTTTTTT (SEQ ID NO: 258) | |
| 259 | GTGGTAGAGGGTGTTTCACGGTTTTAGAGCTAGAAA | 5′ pegRNA |
| | TAGCAAGTTAAAATAAGGCTAGTCCGTTATCAACTTG | |
| | AAAAAGTGGCACCGAGTCGGTGCTAAGTCAAATGAG | |
| | ACTTTGAAACACCCT (SEQ ID NO: 259) | |
| 260 | GTGGTAGAGGGTGTTTCACGGTTTTAGAGCTAGAAA | 5′ pegRNA, |
| | TAGCAAGTTAAAATAAGGCTAGTCCGTTATCAACTTG | transcription |
| | AAAAAGTGGCACCGAGTCGGTGCTAAGTCAAATGAG | adaptation |
| | ACTTTGAAACACCCTATTTTTTT (SEQ ID NO: 260) | (3′TTTTTTT, 3′A) |
| 261 | GTGGTAGAGGGTGTTTCACGGTTTTAGAGCTAGAAA | 5′ pegRNA |
| | TAGCAAGTTAAAATAAGGCTAGTCCGTTATCAACTTG | |
| | AAAAAGTGGCACCGAGTCGGTGCAATTTCAAGATCC | |
| | TGCCTGAAACACCCT (SEQ ID NO: 261) | |
| 262 | GTGGTAGAGGGTGTTTCACGGTTTTAGAGCTAGAAA | 5′ pegRNA, |
| | TAGCAAGTTAAAATAAGGCTAGTCCGTTATCAACTTG | transcription |
| | AAAAAGTGGCACCGAGTCGGTGCAATTTCAAGATCC | adaptation |
| | TGCCTGAAACACCCTATTTTTTT (SEQ ID NO: 262) | (3′TTTTTTT, 3′A) |
| 263 | GTGGTAGAGGGTGTTTCACGGTTTTAGAGCTAGAAA | 5′ pegRNA |
| | TAGCAAGTTAAAATAAGGCTAGTCCGTTATCAACTTG | |
| | AAAAAGTGGCACCGAGTCGGTGCTTGCTCTCTGCCAT | |
| | GTACGAAACACCCT (SEQ ID NO: 263) | |
| 264 | GTGGTAGAGGGTGTTTCACGGTTTTAGAGCTAGAAA | 5′ pegRNA, |
| | TAGCAAGTTAAAATAAGGCTAGTCCGTTATCAACTTG | transcription |
| | AAAAAGTGGCACCGAGTCGGTGCTTGCTCTCTGCCAT | adaptation |
| | GTACGAAACACCCTATTTTTTT (SEQ ID NO: 264) | (3′TTTTTTT, 3′A) |
| 265 | GTGGTAGAGGGTGTTTCACGGTTTTAGAGCTAGAAA | 5′ pegRNA |
| | TAGCAAGTTAAAATAAGGCTAGTCCGTTATCAACTTG | |
| | AAAAAGTGGCACCGAGTCGGTGCACCTTTGGCCGTT | |
| | CTGAAACACCCT (SEQ ID NO: 265) | |
| 266 | GTGGTAGAGGGTGTTTCACGGTTTTAGAGCTAGAAA | 5′ pegRNA, |
| | TAGCAAGTTAAAATAAGGCTAGTCCGTTATCAACTTG | transcription |
| | AAAAAGTGGCACCGAGTCGGTGCACCTTTGGCCGTT | adaptation |
| | CTGAAACACCCTATTTTTTT (SEQ ID NO: 266) | (3′TTTTTTT, 3′A) |
| 267 | GTGGTAGAGGGTGTTTCACGGTTTTAGAGCTAGAAA | 5′ pegRNA |
| | TAGCAAGTTAAAATAAGGCTAGTCCGTTATCAACTTG | |
| | AAAAAGTGGCACCGAGTCGGTGCTCTGCCCTCCTCTT | |
| | GGGTGAAACACCCT (SEQ ID NO: 267) | |
| 268 | GTGGTAGAGGGTGTTTCACGGTTTTAGAGCTAGAAA | 5′ pegRNA, |
| | TAGCAAGTTAAAATAAGGCTAGTCCGTTATCAACTTG | transcription |
| | AAAAAGTGGCACCGAGTCGGTGCTCTGCCCTCCTCTT | adaptation |
| | GGGTGAAACACCCTATTTTTTT (SEQ ID NO: 268) | (3′TTTTTTT, 3′A) |
| 269 | GTGGTAGAGGGTGTTTCACGGTTTTAGAGCTAGAAA | 5′ pegRNA |
| | TAGCAAGTTAAAATAAGGCTAGTCCGTTATCAACTTG | |
| | AAAAAGTGGCACCGAGTCGGTGCATGTACGGGCCGT | |
| | CCGAAACACCCT (SEQ ID NO: 269) | |
| 270 | GTGGTAGAGGGTGTTTCACGGTTTTAGAGCTAGAAA | 5′ pegRNA, |
| | TAGCAAGTTAAAATAAGGCTAGTCCGTTATCAACTTG | transcription |
| | AAAAAGTGGCACCGAGTCGGTGCATGTACGGGCCGT | adaptation |
| | CCGAAACACCCTATTTTTTT (SEQ ID NO: 270) | (3′TTTTTTT, 3′A) |
| 271 | GTGGTAGAGGGTGTTTCACGGTTTTAGAGCTAGAAA | 5′ pegRNA |
| | TAGCAAGTTAAAATAAGGCTAGTCCGTTATCAACTTG | |
| | AAAAAGTGGCACCGAGTCGGTGCGGCCTGGACGCCA | |
| | GGCCTGAAACACCCT (SEQ ID NO: 271) | |
| 272 | GTGGTAGAGGGTGTTTCACGGTTTTAGAGCTAGAAA | 5′ pegRNA, |
| | TAGCAAGTTAAAATAAGGCTAGTCCGTTATCAACTTG | transcription |
| | AAAAAGTGGCACCGAGTCGGTGCGGCCTGGACGCCA | adaptation |
| | GGCCTGAAACACCCTATTTTTTT (SEQ ID NO: 272) | (3′TTTTTTT, 3′A) |
| 273 | GTGGTAGAGGGTGTTTCACGGTTTTAGAGCTAGAAA | 5′ pegRNA |
| | TAGCAAGTTAAAATAAGGCTAGTCCGTTATCAACTTG | |
| | AAAAAGTGGCACCGAGTCGGTGCTGCCGCACGGCGG | |
| | CTGAAACACCCT (SEQ ID NO: 273) | |
| 274 | GTGGTAGAGGGTGTTTCACGGTTTTAGAGCTAGAAA | 5′ pegRNA, |
| | TAGCAAGTTAAAATAAGGCTAGTCCGTTATCAACTTG | transcription |
| | AAAAAGTGGCACCGAGTCGGTGCTGCCGCACGGCGG | adaptation |
| | CTGAAACACCCTATTTTTTT (SEQ ID NO: 274) | (3′TTTTTTT, 3′A) |
| 275 | GTGGTAGAGGGTGTTTCACGGTTTTAGAGCTAGAAA | 5′ pegRNA |
| | TAGCAAGTTAAAATAAGGCTAGTCCGTTATCAACTTG | |
| | AAAAAGTGGCACCGAGTCGGTGCTTGGAGTTTGCTC | |
| | TGTGTATGAGAAACACCCT (SEQ ID NO: 275) | |
| 276 | GTGGTAGAGGGTGTTTCACGGTTTTAGAGCTAGAAA | 5′ pegRNA, |
| | TAGCAAGTTAAAATAAGGCTAGTCCGTTATCAACTTG | transcription |
| | AAAAAGTGGCACCGAGTCGGTGCTTGGAGTTTGCTC | adaptation |
| | TGTGTATGAGAAACACCCTATTTTTTT (SEQ ID NO: | (3′TTTTTTT, 3′A) |
| | 276) | |
| 277 | GTGGTAGAGGGTGTTTCACGGTTTTAGAGCTAGAAA | 5′ pegRNA |
| | TAGCAAGTTAAAATAAGGCTAGTCCGTTATCAACTTG | |
| | AAAAAGTGGCACCGAGTCGGTGCTTTACACTAGATG | |
| | GTGCTGTGAAACACCCT (SEQ ID NO: 277) | |
| 278 | GTGGTAGAGGGTGTTTCACGGTTTTAGAGCTAGAAA | 5′ pegRNA, |
| | TAGCAAGTTAAAATAAGGCTAGTCCGTTATCAACTTG | transcription |
| | AAAAAGTGGCACCGAGTCGGTGCTTTACACTAGATG | adaptation |
| | GTGCTGTGAAACACCCTATTTTTTT (SEQ ID NO: 278) | (3′TTTTTTT, 3′A) |
| 279 | GTGGTAGAGGGTGTTTCACGGTTTTAGAGCTAGAAA | 5′ pegRNA |
| | TAGCAAGTTAAAATAAGGCTAGTCCGTTATCAACTTG | |
| | AAAAAGTGGCACCGAGTCGGTGCACTTCACATCCAG | |
| | TGACGAGGAAACACCCT (SEQ ID NO: 279) | |
| 280 | GTGGTAGAGGGTGTTTCACGGTTTTAGAGCTAGAAA | 5′ pegRNA, |
| | TAGCAAGTTAAAATAAGGCTAGTCCGTTATCAACTTG | transcription |
| | AAAAAGTGGCACCGAGTCGGTGCACTTCACATCCAG | adaptation |
| | TGACGAGGAAACACCCTATTTTTTT (SEQ ID NO: 280) | (3′TTTTTTT, 3′A) |
| 281 | GTGGTAGAGGGTGTTTCACGGTTTTAGAGCTAGAAA | 5′ pegRNA |
| | TAGCAAGTTAAAATAAGGCTAGTCCGTTATCAACTTG | |
| | AAAAAGTGGCACCGAGTCGGTGCGCGGTATCACCTA | |
| | CGACATCAAGAAACACCCT (SEQ ID NO: 281) | |
| 282 | GTGGTAGAGGGTGTTTCACGGTTTTAGAGCTAGAAA | 5′ pegRNA, |
| | TAGCAAGTTAAAATAAGGCTAGTCCGTTATCAACTTG | transcription |
| | AAAAAGTGGCACCGAGTCGGTGCGCGGTATCACCTA | adaptation |
| | CGACATCAAGAAACACCCTATTTTTTT (SEQ ID NO: | (3′TTTTTTT, 3′A) |
| | 282) | |
| 283 | GTGGTAGAGGGTGTTTCACGGTTTTAGAGCTAGAAA | 5′ pegRNA |
| | TAGCAAGTTAAAATAAGGCTAGTCCGTTATCAACTTG | |
| | AAAAAGTGGCACCGAGTCGGTGCCTGCCCCTGAGGG | |
| | ACGATCCGAAACACCCT (SEQ ID NO: 283) | |
| 284 | GTGGTAGAGGGTGTTTCACGGTTTTAGAGCTAGAAA | 5′ pegRNA, |
| | TAGCAAGTTAAAATAAGGCTAGTCCGTTATCAACTTG | transcription |
| | AAAAAGTGGCACCGAGTCGGTGCCTGCCCCTGAGGG | adaptation |
| | ACGATCCGAAACACCCTATTTTTTT (SEQ ID NO: 284) | (3′TTTTTTT, 3′A) |
| 285 | GTGGTAGAGGGTGTTTCACGGTTTTAGAGCTAGAAA | 5′ pegRNA |
| | TAGCAAGTTAAAATAAGGCTAGTCCGTTATCAACTTG | |
| | AAAAAGTGGCACCGAGTCGGTGCGGGTCTGATGCCC | |
| | GAGACCACGAGAAACACCCT (SEQ ID NO: 285) | |
| 286 | GTGGTAGAGGGTGTTTCACGGTTTTAGAGCTAGAAA | 5′ pegRNA, |
| | TAGCAAGTTAAAATAAGGCTAGTCCGTTATCAACTTG | transcription |
| | AAAAAGTGGCACCGAGTCGGTGCGGGTCTGATGCCC | adaptation |
| | GAGACCACGAGAAACACCCTATTTTTTT (SEQ ID NO: | (3′TTTTTTT, 3′A) |
| | 286) | |
| 287 | GTGGTAGAGGGTGTTTCACGGTTTTAGAGCTAGAAA | 5′ pegRNA |
| | TAGCAAGTTAAAATAAGGCTAGTCCGTTATCAACTTG | |
| | AAAAAGTGGCACCGAGTCGGTGCGCCCCACGGGCCG | |
| | AGTGCGGGAAACACCCT (SEQ ID NO: 287) | |
| 288 | GTGGTAGAGGGTGTTTCACGGTTTTAGAGCTAGAAA | 5′ pegRNA, |
| | TAGCAAGTTAAAATAAGGCTAGTCCGTTATCAACTTG | transcription |
| | AAAAAGTGGCACCGAGTCGGTGCGCCCCACGGGCCG | adaptation |
| | AGTGCGGGAAACACCCTATTTTTTT (SEQ ID NO: 288) | (3′TTTTTTT, 3′A) |
| 289 | GTGGTAGAGGGTGTTTCACGGTTTTAGAGCTAGAAA | 5′ pegRNA |
| | TAGCAAGTTAAAATAAGGCTAGTCCGTTATCAACTTG | |
| | AAAAAGTGGCACCGAGTCGGTGCTAACTGCTCTATA | |
| | TACGAGATTATCAAATCGAAACACCCT (SEQ ID NO: | |
| | 289) | |
| 290 | GTGGTAGAGGGTGTTTCACGGTTTTAGAGCTAGAAA | 5′ pegRNA, |
| | TAGCAAGTTAAAATAAGGCTAGTCCGTTATCAACTTG | transcription |
| | AAAAAGTGGCACCGAGTCGGTGCTAACTGCTCTATA | adaptation |
| | TACGAGATTATCAAATCGAAACACCCTATTTTTTT | (3′TTTTTTT, 3′A) |
| | (SEQ ID NO: 290) | |
| 291 | GTGGTAGAGGGTGTTTCACGGTTTTAGAGCTAGAAA | 5′ pegRNA |
| | TAGCAAGTTAAAATAAGGCTAGTCCGTTATCAACTTG | |
| | AAAAAGTGGCACCGAGTCGGTGCGGTAACGTAATAC | |
| | AAGGAAACATGAGACACGAAACACCCT (SEQ ID NO: | |
| | 291) | |
| 292 | GTGGTAGAGGGTGTTTCACGGTTTTAGAGCTAGAAA | 5′ pegRNA, |
| | TAGCAAGTTAAAATAAGGCTAGTCCGTTATCAACTTG | transcription |
| | AAAAAGTGGCACCGAGTCGGTGCGGTAACGTAATAC | adaptation |
| | AAGGAAACATGAGACACGAAACACCCTATTTTTTT | (3′TTTTTTT, 3′A) |
| | (SEQ ID NO: 292) | |
| 293 | GTGGTAGAGGGTGTTTCACGGTTTTAGAGCTAGAAA | 5′ pegRNA |
| | TAGCAAGTTAAAATAAGGCTAGTCCGTTATCAACTTG | |
| | AAAAAGTGGCACCGAGTCGGTGCCAAGTTGTGCCCC | |
| | TAGTGAGCTTGGATTACGAAACACCCT (SEQ ID NO: | |
| | 293) | |
| 294 | GTGGTAGAGGGTGTTTCACGGTTTTAGAGCTAGAAA | 5′ pegRNA, |
| | TAGCAAGTTAAAATAAGGCTAGTCCGTTATCAACTTG | transcription |
| | AAAAAGTGGCACCGAGTCGGTGCCAAGTTGTGCCCC | adaptation |
| | TAGTGAGCTTGGATTACGAAACACCCTATTTTTTT | (3′TTTTTTT, 3′A) |
| | (SEQ ID NO: 294) | |
| 295 | GTGGTAGAGGGTGTTTCACGGTTTTAGAGCTAGAAA | 5′ pegRNA |
| | TAGCAAGTTAAAATAAGGCTAGTCCGTTATCAACTTG | |
| | AAAAAGTGGCACCGAGTCGGTGCGCGCGAACCTGGG | |
| | ATCGCCATGCATGATAGGAAACACCCT (SEQ ID NO: | |
| | 295) | |
| 296 | GTGGTAGAGGGTGTTTCACGGTTTTAGAGCTAGAAA | 5′ pegRNA, |
| | TAGCAAGTTAAAATAAGGCTAGTCCGTTATCAACTTG | transcription |
| | AAAAAGTGGCACCGAGTCGGTGCGCGCGAACCTGGG | adaptation |
| | ATCGCCATGCATGATAGGAAACACCCTATTTTTTT | (3′TTTTTTT, 3′A) |
| | (SEQ ID NO: 296) | |
| 297 | GTGGTAGAGGGTGTTTCACGGTTTTAGAGCTAGAAA | 5′ pegRNA |
| | TAGCAAGTTAAAATAAGGCTAGTCCGTTATCAACTTG | |
| | AAAAAGTGGCACCGAGTCGGTGCATGATCCTGACGA | |
| | CGGAGACCGCCGTCGTCGACAAGCCGAAACACCCT | |
| | (SEQ ID NO: 297) | |
| 298 | GTGGTAGAGGGTGTTTCACGGTTTTAGAGCTAGAAA | 5′ pegRNA, |
| | TAGCAAGTTAAAATAAGGCTAGTCCGTTATCAACTTG | transcription |
| | AAAAAGTGGCACCGAGTCGGTGCATGATCCTGACGA | adaptation |
| | CGGAGACCGCCGTCGTCGACAAGCCGAAACACCCTA | (3′TTTTTTT, 3′A) |
| | TTTTTTT (SEQ ID NO: 298) | |
| 299 | GTGGTAGAGGGTGTTTCACGGTTTTAGAGCTAGAAA | 5′ pegRNA |
| | TAGCAAGTTAAAATAAGGCTAGTCCGTTATCAACTTG | |
| | AAAAAGTGGCACCGAGTCGGTGCGGCTTGTCGACGA | |
| | CGGCGGTCTCCGTCGTCAGGATCATGAAACACC (SEQ | |
| | ID NO: 299) | |
| 300 | GTGGTAGAGGGTGTTTCACGGTTTTAGAGCTAGAAA | 5′ pegRNA, |
| | TAGCAAGTTAAAATAAGGCTAGTCCGTTATCAACTTG | transcription |
| | AAAAAGTGGCACCGAGTCGGTGCGGCTTGTCGACGA | adaptation |
| | CGGCGGTCTCCGTCGTCAGGATCATGAAACACCTTTT | (3′TTTTTTT) |
| | TTT (SEQ ID NO: 300) | |
| 301 | GTGGTAGAGGGTGTTTCACGGTTTTAGAGCTAGAAA | 5′ pegRNA |
| | TAGCAAGTTAAAATAAGGCTAGTCCGTTATCAACTTG | |
| | AAAAAGTGGCACCGAGTCGGTGCGGCTTGTCGACGA | |
| | CGGCGGTCTCCGTCGTCAGGATCATGAAACACCC | |
| | (SEQ ID NO: 301) | |
| 302 | GTGGTAGAGGGTGTTTCACGGTTTTAGAGCTAGAAA | 5′ pegRNA, |
| | TAGCAAGTTAAAATAAGGCTAGTCCGTTATCAACTTG | transcription |
| | AAAAAGTGGCACCGAGTCGGTGCGGCTTGTCGACGA | adaptation |
| | CGGCGGTCTCCGTCGTCAGGATCATGAAACACCCTTT | (3′TTTTTTT) |
| | TTTT (SEQ ID NO: 302) | |
| 303 | GTGGTAGAGGGTGTTTCACGGTTTTAGAGCTAGAAA | 5′ pegRNA |
| | TAGCAAGTTAAAATAAGGCTAGTCCGTTATCAACTTG | |
| | AAAAAGTGGCACCGAGTCGGTGCGGCTTGTCGACGA | |
| | CGGCGGTCTCCGTCGTCAGGATCATGAAACACCCTC | |
| | (SEQ ID NO: 303) | |
| 304 | GTGGTAGAGGGTGTTTCACGGTTTTAGAGCTAGAAA | 5′ pegRNA, |
| | TAGCAAGTTAAAATAAGGCTAGTCCGTTATCAACTTG | transcription |
| | AAAAAGTGGCACCGAGTCGGTGCGGCTTGTCGACGA | adaptation |
| | CGGCGGTCTCCGTCGTCAGGATCATGAAACACCCTCT | (3′TTTTTTT) |
| | TTTTTT (SEQ ID NO: 304) | |
| 305 | GTGGTAGAGGGTGTTTCACGGTTTTAGAGCTAGAAA | 5′ pegRNA |
| | TAGCAAGTTAAAATAAGGCTAGTCCGTTATCAACTTG | |
| | AAAAAGTGGCACCGAGTCGGTGCGGCTTGTCGACGA | |
| | CGGCGGTCTCCGTCGTCAGGATCATGAAACACCCTCT | |
| | A (SEQ ID NO: 305) | |
| 306 | GTGGTAGAGGGTGTTTCACGGTTTTAGAGCTAGAAA | 5′ pegRNA, |
| | TAGCAAGTTAAAATAAGGCTAGTCCGTTATCAACTTG | transcription |
| | AAAAAGTGGCACCGAGTCGGTGCGGCTTGTCGACGA | adaptation |
| | CGGCGGTCTCCGTCGTCAGGATCATGAAACACCCTCT | (3′TTTTTTT) |
| | ATTTTTTT (SEQ ID NO: 306) | |
| 307 | GTGGTAGAGGGTGTTTCACGGTTTTAGAGCTAGAAA | 5′ pegRNA |
| | TAGCAAGTTAAAATAAGGCTAGTCCGTTATCAACTTG | |
| | AAAAAGTGGCACCGAGTCGGTGCGGCTTGTCGACGA | |
| | CGGCGGTCTCCGTCGTCAGGATCATGAAACACCCTCT | |
| | AC (SEQ ID NO: 307) | |
| 308 | GTGGTAGAGGGTGTTTCACGGTTTTAGAGCTAGAAA | 5′ pegRNA, |
| | TAGCAAGTTAAAATAAGGCTAGTCCGTTATCAACTTG | transcription |
| | AAAAAGTGGCACCGAGTCGGTGCGGCTTGTCGACGA | adaptation |
| | CGGCGGTCTCCGTCGTCAGGATCATGAAACACCCTCT | (3′TTTTTTT) |
| | ACTTTTTTT (SEQ ID NO: 308) | |
| 309 | GTGGTAGAGGGTGTTTCACGGTTTTAGAGCTAGAAA | 5′ pegRNA |
| | TAGCAAGTTAAAATAAGGCTAGTCCGTTATCAACTTG | |
| | AAAAAGTGGCACCGAGTCGGTGCGGCTTGTCGACGA | |
| | CGGCGGTCTCCGTCGTCAGGATCATGAAACACCCTCT | |
| | ACC (SEQ ID NO: 309) | |
| 310 | GTGGTAGAGGGTGTTTCACGGTTTTAGAGCTAGAAA | 5′ pegRNA, |
| | TAGCAAGTTAAAATAAGGCTAGTCCGTTATCAACTTG | transcription |
| | AAAAAGTGGCACCGAGTCGGTGCGGCTTGTCGACGA | adaptation |
| | CGGCGGTCTCCGTCGTCAGGATCATGAAACACCCTCT | (3′TTTTTTT) |
| | ACCTTTTTTT (SEQ ID NO: 310) | |
| 311 | GTGGTAGAGGGTGTTTCACGGTTTTAGAGCTAGAAA | 5′ pegRNA |
| | TAGCAAGTTAAAATAAGGCTAGTCCGTTATCAACTTG | |
| | AAAAAGTGGCACCGAGTCGGTGCGGCTTGTCGACGA | |
| | CGGCGGTCTCCGTCGTCAGGATCATGAAACACCCTCT | |
| | ACCA (SEQ ID NO: 311) | |
| 312 | GTGGTAGAGGGTGTTTCACGGTTTTAGAGCTAGAAA | 5′ pegRNA, |
| | TAGCAAGTTAAAATAAGGCTAGTCCGTTATCAACTTG | transcription |
| | AAAAAGTGGCACCGAGTCGGTGCGGCTTGTCGACGA | adaptation |
| | CGGCGGTCTCCGTCGTCAGGATCATGAAACACCCTCT | (3′TTTTTTT) |
| | ACCATTTTTTT (SEQ ID NO: 312) | |
| 313 | GTGGTAGAGGGTGTTTCACGGTTTTAGAGCTAGAAA | 5′ pegRNA |
| | TAGCAAGTTAAAATAAGGCTAGTCCGTTATCAACTTG | |
| | AAAAAGTGGCACCGAGTCGGTGCGGCTTGTCGACGA | |
| | CGGCGGTCTCCGTCGTCAGGATCATGAAACACCCTCT | |
| | ACCAC (SEQ ID NO: 313) | |
| 314 | GTGGTAGAGGGTGTTTCACGGTTTTAGAGCTAGAAA | 5′ pegRNA, |
| | TAGCAAGTTAAAATAAGGCTAGTCCGTTATCAACTTG | transcription |
| | AAAAAGTGGCACCGAGTCGGTGCGGCTTGTCGACGA | adaptation |
| | CGGCGGTCTCCGTCGTCAGGATCATGAAACACCCTCT | (3′TTTTTTT) |
| | ACCACTTTTTTT (SEQ ID NO: 314) | |
| 315 | GTGGTAGAGGGTGTTTCACGGTTTAAGAGCGGGGAA | 5′ pegRNA, gRNA |
| | ATCCGCAAGTTTAAATAAGGCTAGTCCGTTATCAGCG | core SEQ ID NO: |
| | TGAAAACGCGGCACCGAGTCGGTGCGGCTTGTCGAC | 2259 |
| | GACGGCGGTCTCCGTCGTCAGGATCATGAAACACCC | |
| | T (SEQ ID NO: 315) | |
| 316 | GTGGTAGAGGGTGTTTCACGGTTTAAGAGCGGGGAA | 5′ pegRNA, |
| | ATCCGCAAGTTTAAATAAGGCTAGTCCGTTATCAGCG | transcription |
| | TGAAAACGCGGCACCGAGTCGGTGCGGCTTGTCGAC | adaptation |
| | GACGGCGGTCTCCGTCGTCAGGATCATGAAACACCC | (3′TTTTTTT), gRNA |
| | TTTTTTTT (SEQ ID NO: 316) | core SEQ ID NO: |
| | | 2259 |
| 317 | GTGGTAGAGGGTGTTTCACGGTTTTAGAGCTAGAAA | 5′ pegRNA, linker |
| | TAGCAAGTTAAAATAAGGCTAGTCCGTTATCAACTTG | sequence number |
| | AAAAAGTGGCACCGAGTCGGTGCGGCTTGTCGACGA | 2257, 3′ motif SEQ |
| | CGGCGGTCTCCGTCGTCAGGATCATGAAACACCCTC | ID NO: 2237 |
| | AATCTCGCGGTTCTATCTAGTTACGCGTTAAACCAAC | |
| | TAGAA (SEQ ID NO: 317) | |
| 318 | GTGGTAGAGGGTGTTTCACGGTTTTAGAGCTAGAAA | 5′ pegRNA, linker |
| | TAGCAAGTTAAAATAAGGCTAGTCCGTTATCAACTTG | sequence number |
| | AAAAAGTGGCACCGAGTCGGTGCGGCTTGTCGACGA | 2257, 3′ motif SEQ |
| | CGGCGGTCTCCGTCGTCAGGATCATGAAACACCCTC | ID NO: 2237, |
| | AATCTCGCGGTTCTATCTAGTTACGCGTTAAACCAAC | transcription |
| | TAGAATTTTTTT (SEQ ID NO: 318) | adaptation |
| | | (3′TTTTTTT) |
| 319 | GTGGTAGAGGGTGTTTCACGGTTTTAGAGCTAGAAA | 5′ pegRNA, linker |
| | TAGCAAGTTAAAATAAGGCTAGTCCGTTATCAACTTG | sequence number |
| | AAAAAGTGGCACCGAGTCGGTGCGGCTTGTCGACGA | 2247, 3′ motif SEQ |
| | CGGCGGTCTCCGTCGTCAGGATCATGAAACACCCTCC | ID NO: 2237 |
| | CCGTCGCGGTTCTATCTAGTTACGCGTTAAACCAACT | |
| | AGAA (SEQ ID NO: 319) | |
| 320 | GTGGTAGAGGGTGTTTCACGGTTTTAGAGCTAGAAA | 5′ pegRNA, linker |
| | TAGCAAGTTAAAATAAGGCTAGTCCGTTATCAACTTG | sequence number |
| | AAAAAGTGGCACCGAGTCGGTGCGGCTTGTCGACGA | 2247, 3′ motif SEQ |
| | CGGCGGTCTCCGTCGTCAGGATCATGAAACACCCTCC | ID NO: 2237, |
| | CCGTCGCGGTTCTATCTAGTTACGCGTTAAACCAACT | transcription |
| | AGAATTTTTTT (SEQ ID NO: 320) | adaptation |
| | | (3′TTTTTTT) |
| 321 | GTGGTAGAGGGTGTTTCACGGTTTAAGAGCGGGGAA | 5′ pegRNA, linker |
| | ATCCGCAAGTTTAAATAAGGCTAGTCCGTTATCAGCG | sequence number |
| | TGAAAACGCGGCACCGAGTCGGTGCGGCTTGTCGAC | 2241, 3′ motif SEQ |
| | GACGGCGGTCTCCGTCGTCAGGATCATGAAACACCC | ID NO: 2237, gRNA |
| | TATGTTACGCGGTTCTATCTAGTTACGCGTTAAACCA | core SEQ ID NO: |
| | ACTAGAA (SEQ ID NO: 321) | 2259 |
| 322 | GTGGTAGAGGGTGTTTCACGGTTTAAGAGCGGGGAA | 5′ pegRNA, linker |
| | ATCCGCAAGTTTAAATAAGGCTAGTCCGTTATCAGCG | sequence number |
| | TGAAAACGCGGCACCGAGTCGGTGCGGCTTGTCGAC | 2241, 3′ motif SEQ |
| | GACGGCGGTCTCCGTCGTCAGGATCATGAAACACCC | ID NO: 2237, |
| | TATGTTACGCGGTTCTATCTAGTTACGCGTTAAACCA | transcription |
| | ACTAGAATTTTTTT (SEQ ID NO: 322) | adaptation |
| | | (3′TTTTTTT), gRNA |
| | | core SEQ ID NO: |
| | | 2259 |
| 323 | GTGGTAGAGGGTGTTTCACGGTTTAAGAGCGGGGAA | 5′ pegRNA, linker |
| | ATCCGCAAGTTTAAATAAGGCTAGTCCGTTATCAGCG | sequence number |
| | TGAAAACGCGGCACCGAGTCGGTGCGGCTTGTCGAC | 2248, 3′ motif SEQ |
| | GACGGCGGTCTCCGTCGTCAGGATCATGAAACACCC | ID NO: 2237, gRNA |
| | TATGTTGCGCGGTTCTATCTAGTTACGCGTTAAACCA | core SEQ ID NO: |
| | ACTAGAA (SEQ ID NO: 323) | 2259 |
| 324 | GTGGTAGAGGGTGTTTCACGGTTTAAGAGCGGGGAA | 5′ pegRNA, linker |
| | ATCCGCAAGTTTAAATAAGGCTAGTCCGTTATCAGCG | sequence number |
| | TGAAAACGCGGCACCGAGTCGGTGCGGCTTGTCGAC | 2248, 3′ motif SEQ |
| | GACGGCGGTCTCCGTCGTCAGGATCATGAAACACCC | ID NO: 2237, |
| | TATGTTGCGCGGTTCTATCTAGTTACGCGTTAAACCA | transcription |
| | ACTAGAATTTTTTT (SEQ ID NO: 324) | adaptation |
| | | (3′TTTTTTT), gRNA |
| | | core SEQ ID NO: |
| | | 2259 |
| 325 | GTGGTAGAGGGTGTTTCACGGTATAAGAGCGGGGAA | 5′ pegRNA, gRNA |
| | ATCCGCAAGTTTATATAAGGCTAGTCCGTTATCAGCG | core SEQ ID NO: |
| | TGAAAGCGCGGCACCGAGTCGGTGCGGCTTGTCGAC | 2265 |
| | GACGGCGGTCTCCGTCGTCAGGATCATGAAACACCC | |
| | T (SEQ ID NO: 325) | |
| 326 | GTGGTAGAGGGTGTTTCACGGTATAAGAGCGGGGAA | 5′ pegRNA, |
| | ATCCGCAAGTTTATATAAGGCTAGTCCGTTATCAGCG | transcription |
| | TGAAAGCGCGGCACCGAGTCGGTGCGGCTTGTCGAC | adaptation |
| | GACGGCGGTCTCCGTCGTCAGGATCATGAAACACCC | (3′TTTTTTT), gRNA |
| | TTTTTTTT (SEQ ID NO: 326) | core SEQ ID NO: |
| | | 2265 |
| 327 | GTGGTAGAGGGTGTTTCACGGTATAAGAGCGGGGAA | 5′ pegRNA, gRNA |
| | ATCCGCAAGTTTATATAAGGCTAGTCCGTTATCAGCG | core SEQ ID NO: |
| | TGAAAGCGCGGCACCGAATCGGTGTGGCTTGTCGAC | 2266 |
| | GACGGCGGTCTCCGTCGTCAGGATCATGAAACACCC | |
| | T (SEQ ID NO: 327) | |
| 328 | GTGGTAGAGGGTGTTTCACGGTATAAGAGCGGGGAA | 5′ pegRNA, |
| | ATCCGCAAGTTTATATAAGGCTAGTCCGTTATCAGCG | transcription |
| | TGAAAGCGCGGCACCGAATCGGTGTGGCTTGTCGAC | adaptation |
| | GACGGCGGTCTCCGTCGTCAGGATCATGAAACACCC | (3′TTTTTTT), gRNA |
| | TTTTTTTT (SEQ ID NO: 328) | core SEQ ID NO: |
| | | 2266 |
| 329 | GTGGTAGAGGGTGTTTCACGGTTTTAGAGCTAGAAA | 5′ pegRNA, |
| | TAGCAAGTTAAAATAAGGCTAGTCCGTTATCAACTTG | transcription |
| | AAAAAGTGGCACCGAGTCGGTGCGGCTTGTCGACGA | adaptation (3′ TTTT) |
| | CGGCGGTCTCCGTCGTCAGGATCATGAAACACCCTTT | |
| | TT (SEQ ID NO: 329) | |
| 330 | GTGGTAGAGGGTGTTTCACGGTTTTAGAGCTAGAAA | 5′ pegRNA, |
| | TAGCAAGTTAAAATAAGGCTAGTCCGTTATCAACTTG | transcription |
| | AAAAAGTGGCACCGAGTCGGTGCGGCTTGTCGACGA | adaptation (3′ TTTT) |
| | CGGCGGTCTCCGTCGTCAGGATCATGAAACACCCTCT | |
| | TTTT (SEQ ID NO: 330) | |
| 2534 | GTGGTAGAGGGTGTTTCACGGTTTTAGAGCTAGAAA | 5′ pegRNA |
| | TAGCAAGTTAAAATAAGGCTAGTCCGTTATCAACTTG | |
| | AAAAAGTGGCACCGAGTCGGTGCAGCACTGGGCCAC | |
| | ACTCTTTGAGATTTGCCGCCCCTAGAAACACCCTCT | |
| | (SEQ ID NO: 2534) | |
| 2535 | GTGGTAGAGGGTGTTTCACGGTTTTAGAGCTAGAAA | 5′ pegRNA |
| | TAGCAAGTTAAAATAAGGCTAGTCCGTTATCAACTTG | |
| | AAAAAGTGGCACCGAGTCGGTGCTGGGCCACACTCT | |
| | TTGAGATTTGCCGCCCCTAGAAACACCCTCT (SEQ ID | |
| | NO: 2535) | |
| 2536 | GTGGTAGAGGGTGTTTCACGGTTTTAGAGCTAGAAA | 5′ pegRNA |
| | TAGCAAGTTAAAATAAGGCTAGTCCGTTATCAACTTG | |
| | AAAAAGTGGCACCGAGTCGGTGCGCCGCTACTTTCA | |
| | GCACTGGGCCACACTCTTTGAGATTTGCCGCCCCTAG | |
| | AAACACCCTCT (SEQ ID NO: 2536) | |
| 2537 | GTGGTAGAGGGTGTTTCACGGTTTTAGAGCTAGAAA | 5′ pegRNA |
| | TAGCAAGTTAAAATAAGGCTAGTCCGTTATCAACTTG | |
| | AAAAAGTGGCACCGAGTCGGTGCTACTTTCAGCACT | |
| | GGGCCACACTCTTTGAGATTTGCCGCCCCTAGAAACA | |
| | CCCTCT (SEQ ID NO: 2537) | |
| 2538 | GTGGTAGAGGGTGTTTCACGGTTTTAGAGCTAGAAA | 5′ pegRNA |
| | TAGCAAGTTAAAATAAGGCTAGTCCGTTATCAACTTG | |
| | AAAAAGTGGCACCGAGTCGGTGCAGCACTGGGCCAC | |
| | ACTCTTTGAGATTTGCCGCCCCTAGAAACACCCTCTA | |
| | (SEQ ID NO: 2538) | |
| 2539 | GTGGTAGAGGGTGTTTCACGGTTTTAGAGCTAGAAA | 5′ pegRNA |
| | TAGCAAGTTAAAATAAGGCTAGTCCGTTATCAACTTG | |
| | AAAAAGTGGCACCGAGTCGGTGCTGGGCCACACTCT | |
| | TTGAGATTTGCCGCCCCTAGAAACACCCTCTA (SEQ | |
| | ID NO: 2539) | |
| 2540 | GTGGTAGAGGGTGTTTCACGGTTTTAGAGCTAGAAA | 5′ pegRNA |
| | TAGCAAGTTAAAATAAGGCTAGTCCGTTATCAACTTG | |
| | AAAAAGTGGCACCGAGTCGGTGCGCCGCTACTTTCA | |
| | GCACTGGGCCACACTCTTTGAGATTTGCCGCCCCTAG | |
| | AAACACCCTCTA (SEQ ID NO: 2540) | |
| 2541 | GTGGTAGAGGGTGTTTCACGGTTTTAGAGCTAGAAA | 5′ pegRNA |
| | TAGCAAGTTAAAATAAGGCTAGTCCGTTATCAACTTG | |
| | AAAAAGTGGCACCGAGTCGGTGCTACTTTCAGCACT | |
| | GGGCCACACTCTTTGAGATTTGCCGCCCCTAGAAACA | |
| | CCCTCTA (SEQ ID NO: 2541) | |

TABLE 4
Exemplary 5′ PEgRNA and component sequence

| Sequence | | |
|---|---|---|
| number | Sequence | Description |
| 331 | CAAGACTAACCTGGCCAACA (SEQ ID NO: 331) | 5′ Spacer |
| 332 | GACTAACCTGGCCAACA (SEQ ID NO: 332) | 5′ Spacer |
| 333 | AGACTAACCTGGCCAACA (SEQ ID NO: 333) | 5′ Spacer |
| 334 | AAGACTAACCTGGCCAACA (SEQ ID NO: 334) | 5′ Spacer |
| 335 | TCAAGACTAACCTGGCCAACA (SEQ ID NO: 335) | 5′ Spacer |
| 336 | TTCAAGACTAACCTGGCCAACA (SEQ ID NO: 336) | 5′ Spacer |
| 337 | TGGCC | 5′ PBS |
| 338 | TGGCCA | 5′ PBS |
| 339 | TGGCCAG | 5′ PBS |
| 340 | TGGCCAGG | 5′ PBS |
| 341 | TGGCCAGGT | 5′ PBS |
| 342 | TGGCCAGGTT (SEQ ID NO: 342) | 5′ PBS |
| 343 | TGGCCAGGTTA (SEQ ID NO: 343) | 5′ PBS |
| 344 | TGGCCAGGTTAG (SEQ ID NO: 344) | 5′ PBS |
| 345 | TGGCCAGGTTAGT (SEQ ID NO: 345) | 5′ PBS |
| 346 | TGGCCAGGTTAGTC (SEQ ID NO: 346) | 5′ PBS |
| 347 | TGGCCAGGTTAGTCT (SEQ ID NO: 347) | 5′ PBS |
| 348 | TGGCCAGGTTAGTCTT (SEQ ID NO: 348) | 5′ PBS |
| 349 | TGGCCAGGTTAGTCTTG (SEQ ID NO: 349) | 5′ PBS |
| 350 | TGGCCAGGTTAGTCTTGA (SEQ ID NO: 350) | 5′ PBS |
| 351 | TGGCCAGGTTAGTCTTGAA (SEQ ID NO: 351) | 5′ PBS |
| 352 | CAAGACTAACCTGGCCAACAGTTTTAGAGCTAGA | 5′ pegRNA |
| | AATAGCAAGTTAAAATAAGGCTAGTCCGTTATCA | |
| | ACTTGAAAAAGTGGCACCGAGTCGGTGCGGCTTG | |
| | TCGACGACGGCGGTCTCCGTCGTCAGGATCATTG | |
| | GCCAGGTTA (SEQ ID NO: 352) | |
| 353 | GCAAGACTAACCTGGCCAACAGTTTTAGAGCTAG | 5′ pegRNA, transcription |
| | AAATAGCAAGTTAAAATAAGGCTAGTCCGTTATC | adaptation (5′G, |
| | AACTTGAAAAAGTGGCACCGAGTCGGTGCGGCTT | 3′TTTTTTT) |
| | GTCGACGACGGCGGTCTCCGTCGTCAGGATCATT | |
| | GGCCAGGTTATTTTTTT (SEQ ID NO: 353) | |
| 354 | CAAGACTAACCTGGCCAACAGTTTTAGAGCTAGA | 5′ pegRNA |
| | AATAGCAAGTTAAAATAAGGCTAGTCCGTTATCA | |
| | ACTTGAAAAAGTGGCACCGAGTCGGTGCGGCTTG | |
| | TCGACGACGGCGGTCTCCGTCGTCAGGATCATTG | |
| | GCCAGGTTAGT (SEQ ID NO: 354) | |
| 355 | GCAAGACTAACCTGGCCAACAGTTTTAGAGCTAG | 5′ pegRNA, transcription |
| | AAATAGCAAGTTAAAATAAGGCTAGTCCGTTATC | adaptation (5′G, |
| | AACTTGAAAAAGTGGCACCGAGTCGGTGCGGCTT | 3′TTTTTTT) |
| | GTCGACGACGGCGGTCTCCGTCGTCAGGATCATT | |
| | GGCCAGGTTAGTTTTTTTT (SEQ ID NO: 355) | |
| 357 | CAAGACTAACCTGGCCAACAGTTTTAGAGCTAGA | 5′ pegRNA, transcription |
| | AATAGCAAGTTAAAATAAGGCTAGTCCGTTATCA | adaptation (3′ TTTT) |
| | ACTTGAAAAAGTGGCACCGAGTCGGTGCGGCTTG | |
| | TCGACGACGGCGGTCTCCGTCGTCAGGATCATTG | |
| | GCCAGGATTTT (SEQ ID NO: 357) | |
| 358 | CAAGACTAACCTGGCCAACAGTTTTAGAGCTAGA | 5′ pegRNA |
| | AATAGCAAGTTAAAATAAGGCTAGTCCGTTATCA | |
| | ACTTGAAAAAGTGGCACCGAGTCGGTGCGGCTTG | |
| | TCGACGACGGCGGTCTCCGTCGTCAGGATCATTG | |
| | GCCAGGA (SEQ ID NO: 358) | |
| 359 | CAAGACTAACCTGGCCAACAGTTTTAGAGCTAGA | 5′ pegRNA, transcription |
| | AATAGCAAGTTAAAATAAGGCTAGTCCGTTATCA | adaptation (3′ TTTT) |
| | ACTTGAAAAAGTGGCACCGAGTCGGTGCGGCTTG | |
| | TCGACGACGGCGGTCTCCGTCGTCAGGATCATTG | |
| | GCCAGGTTATTTT (SEQ ID NO: 359) | |
| 360 | CAAGACTAACCTGGCCAACAGTTTTAGAGCTAGA | 5′ pegRNA, transcription |
| | AATAGCAAGTTAAAATAAGGCTAGTCCGTTATCA | adaptation (3′ TTTT) |
| | ACTTGAAAAAGTGGCACCGAGTCGGTGCGGCTTG | |
| | TCGACGACGGCGGTCTCCGTCGTCAGGATCATTG | |
| | GCCAGGTTAGTTTTT (SEQ ID NO: 360) | |
| 361 | CAAGACTAACCTGGCCAACAGTTTTAGAGCTAGA | 5′ pegRNA |
| | AATAGCAAGTTAAAATAAGGCTAGTCCGTTATCA | |
| | ACTTGAAAAAGTGGCACCGAGTCGGTGCGGCTTG | |
| | TCGACGACGGCGGTCTCCGTCGTCAGGATCATTG | |
| | GCCAGG (SEQ ID NO: 361) | |

TABLE 5
Exemplary 5′ PEgRNA and component sequence

| Sequence | | |
|---|---|---|
| number | Sequence | Description |
| 362 | AAGGTGGATCACCTGAGGTC (SEQ ID NO: 362) | 5′ Spacer |
| 363 | GTGGATCACCTGAGGTC (SEQ ID NO: 363) | 5′ Spacer |
| 364 | GGTGGATCACCTGAGGTC (SEQ ID NO: 364) | 5′ Spacer |
| 365 | AGGTGGATCACCTGAGGTC (SEQ ID NO: 365) | 5′ Spacer |
| 366 | GAAGGTGGATCACCTGAGGTC (SEQ ID NO: 366) | 5′ Spacer |
| 367 | GGAAGGTGGATCACCTGAGGTC (SEQ ID NO: 367) | 5′ Spacer |
| 368 | CTCAG | 5′ PBS |
| 369 | CTCAGG | 5′ PBS |
| 370 | CTCAGGT | 5′ PBS |
| 371 | CTCAGGTG | 5′ PBS |
| 372 | CTCAGGTGA | 5′ PBS |
| 373 | CTCAGGTGAT (SEQ ID NO: 373) | 5′ PBS |
| 374 | CTCAGGTGATC (SEQ ID NO: 374) | 5′ PBS |
| 375 | CTCAGGTGATCC (SEQ ID NO: 375) | 5′ PBS |
| 376 | CTCAGGTGATCCA (SEQ ID NO: 376) | 5′ PBS |
| 377 | CTCAGGTGATCCAC (SEQ ID NO: 377) | 5′ PBS |
| 378 | CTCAGGTGATCCACC (SEQ ID NO: 378) | 5′ PBS |
| 379 | CTCAGGTGATCCACCT (SEQ ID NO: 379) | 5′ PBS |
| 380 | CTCAGGTGATCCACCTT (SEQ ID NO: 380) | 5′ PBS |
| 381 | CTCAGGTGATCCACCTTC (SEQ ID NO: 381) | 5′ PBS |
| 382 | CTCAGGTGATCCACCTTCC (SEQ ID NO: 382) | 5′ PBS |
| 383 | AAGGTGGATCACCTGAGGTCGTTTTAGAGCTAGAAATAGCA | 5′ pegRNA |
| | AGTTAAAATAAGGCTAGTCCGTTATCAACTTGAAAAAGTGG | |
| | CACCGAGTCGGTGCGGCTTGTCGACGACGGCGGTCTCCGTC | |
| | GTCAGGATCATCTCAGGTGAT (SEQ ID NO: 383) | |
| 384 | GAAGGTGGATCACCTGAGGTCGTTTTAGAGCTAGAAATAGC | 5′ pegRNA, |
| | AAGTTAAAATAAGGCTAGTCCGTTATCAACTTGAAAAAGTG | transcription |
| | GCACCGAGTCGGTGCGGCTTGTCGACGACGGCGGTCTCCGT | adaptation (5′G, |
| | CGTCAGGATCATCTCAGGTGATTTTTTTT (SEQ ID NO: 384) | 3′TTTTTTT) |
| 385 | AAGGTGGATCACCTGAGGTCGTTTTAGAGCTAGAAATAGCA | 5′ pegRNA |
| | AGTTAAAATAAGGCTAGTCCGTTATCAACTTGAAAAAGTGG | |
| | CACCGAGTCGGTGCGGCTTGTCGACGACGGCGGTCTCCGTC | |
| | GTCAGGATCATCTCAGGTGATCC (SEQ ID NO: 385) | |
| 386 | GAAGGTGGATCACCTGAGGTCGTTTTAGAGCTAGAAATAGC | 5′ pegRNA, |
| | AAGTTAAAATAAGGCTAGTCCGTTATCAACTTGAAAAAGTG | transcription |
| | GCACCGAGTCGGTGCGGCTTGTCGACGACGGCGGTCTCCGT | adaptation (5′G, |
| | CGTCAGGATCATCTCAGGTGATCCTTTTTTT (SEQ ID NO: | 3′TTTTTTT) |
| | 386) | |
| 387 | AAGGTGGATCACCTGAGGTCGTTTTAGAGCTAGAAATAGCA | 5′ pegRNA, |
| | AGTTAAAATAAGGCTAGTCCGTTATCAACTTGAAAAAGTGG | transcription |
| | CACCGAGTCGGTGCGGCTTGTCGACGACGGCGGTCTCCGTC | adaptation (3′ |
| | GTCAGGATCATCTCAGGTGTTTT (SEQ ID NO: 387) | TTTT) |
| 388 | AAGGTGGATCACCTGAGGTCGTTTTAGAGCTAGAAATAGCA | 5′ pegRNA |
| | AGTTAAAATAAGGCTAGTCCGTTATCAACTTGAAAAAGTGG | |
| | CACCGAGTCGGTGCGGCTTGTCGACGACGGCGGTCTCCGTC | |
| | GTCAGGATCATCTCAGGTG (SEQ ID NO: 388) | |
| 389 | AAGGTGGATCACCTGAGGTCGTTTTAGAGCTAGAAATAGCA | 5′ pegRNA, |
| | AGTTAAAATAAGGCTAGTCCGTTATCAACTTGAAAAAGTGG | transcription |
| | CACCGAGTCGGTGCGGCTTGTCGACGACGGCGGTCTCCGTC | adaptation (3′ |
| | GTCAGGATCATCTCAGGTGATTTTT (SEQ ID NO: 389) | TTTT) |
| 390 | AAGGTGGATCACCTGAGGTCGTTTTAGAGCTAGAAATAGCA | 5′ pegRNA, |
| | AGTTAAAATAAGGCTAGTCCGTTATCAACTTGAAAAAGTGG | transcription |
| | CACCGAGTCGGTGCGGCTTGTCGACGACGGCGGTCTCCGTC | adaptation (3′ |
| | GTCAGGATCATCTCAGGTGATCCTTTT (SEQ ID NO: 390) | TTTT) |

TABLE 6
Exemplary 5′ PEgRNA and component sequence

| Sequence | | |
|---|---|---|
| number | Sequence | Description |
| 391 | CTAGGAAGGTGGATCACCTG (SEQ ID NO: 391) | 5′ Spacer |
| 392 | GGAAGGTGGATCACCTG (SEQ ID NO: 392) | 5′ Spacer |
| 393 | AGGAAGGTGGATCACCTG (SEQ ID NO: 393) | 5′ Spacer |
| 394 | TAGGAAGGTGGATCACCTG (SEQ ID NO: 394) | 5′ Spacer |
| 395 | CCTAGGAAGGTGGATCACCTG (SEQ ID NO: 395) | 5′ Spacer |
| 396 | GCCTAGGAAGGTGGATCACCTG (SEQ ID NO: 396) | 5′ Spacer |
| 397 | GTGAT | 5′ PBS |
| 398 | GTGATC | 5′ PBS |
| 399 | GTGATCC | 5′ PBS |
| 400 | GTGATCCA | 5′ PBS |
| 401 | GTGATCCAC | 5′ PBS |
| 402 | GTGATCCACC (SEQ ID NO: 402) | 5′ PBS |
| 403 | GTGATCCACCT (SEQ ID NO: 403) | 5′ PBS |
| 404 | GTGATCCACCTT (SEQ ID NO: 404) | 5′ PBS |
| 405 | GTGATCCACCTTC (SEQ ID NO: 405) | 5′ PBS |
| 406 | GTGATCCACCTTCC (SEQ ID NO: 406) | 5′ PBS |
| 407 | GTGATCCACCTTCCT (SEQ ID NO: 407) | 5′ PBS |
| 408 | GTGATCCACCTTCCTA (SEQ ID NO: 408) | 5′ PBS |
| 409 | GTGATCCACCTTCCTAG (SEQ ID NO: 409) | 5′ PBS |
| 410 | GTGATCCACCTTCCTAGG (SEQ ID NO: 410) | 5′ PBS |
| 411 | GTGATCCACCTTCCTAGGC (SEQ ID NO: 411) | 5′ PBS |
| 412 | CTAGGAAGGTGGATCACCTGGTTTTAGAGCTAG | 5′ pegRNA |
| | AAATAGCAAGTTAAAATAAGGCTAGTCCGTTAT | |
| | CAACTTGAAAAAGTGGCACCGAGTCGGTGCGGC | |
| | TTGTCGACGACGGCGGTCTCCGTCGTCAGGATCA | |
| | TGTGATCCACC (SEQ ID NO: 412) | |
| 413 | GCTAGGAAGGTGGATCACCTGGTTTTAGAGCTA | 5′ pegRNA, transcription |
| | GAAATAGCAAGTTAAAATAAGGCTAGTCCGTTA | adaptation (5′G, |
| | TCAACTTGAAAAAGTGGCACCGAGTCGGTGCGG | 3′TTTTTTT, 3′A) |
| | CTTGTCGACGACGGCGGTCTCCGTCGTCAGGATC | |
| | ATGTGATCCACCATTTTTTT (SEQ ID NO: 413) | |
| 414 | CTAGGAAGGTGGATCACCTGGTTTTAGAGCTAG | 5′ pegRNA |
| | AAATAGCAAGTTAAAATAAGGCTAGTCCGTTAT | |
| | CAACTTGAAAAAGTGGCACCGAGTCGGTGCGGC | |
| | TTGTCGACGACGGCGGTCTCCGTCGTCAGGATCA | |
| | TGTGATCCACCTTC (SEQ ID NO: 414) | |
| 415 | GCTAGGAAGGTGGATCACCTGGTTTTAGAGCTA | 5′ pegRNA, transcription |
| | GAAATAGCAAGTTAAAATAAGGCTAGTCCGTTA | adaptation (5′G, |
| | TCAACTTGAAAAAGTGGCACCGAGTCGGTGCGG | 3′TTTTTTT) |
| | CTTGTCGACGACGGCGGTCTCCGTCGTCAGGATC | |
| | ATGTGATCCACCTTCTTTTTTT (SEQ ID NO: 415) | |
| 417 | CTAGGAAGGTGGATCACCTGGTTTTAGAGCTAG | 5′ pegRNA, transcription |
| | AAATAGCAAGTTAAAATAAGGCTAGTCCGTTAT | adaptation (3′ TTTT) |
| | CAACTTGAAAAAGTGGCACCGAGTCGGTGCGGC | |
| | TTGTCGACGACGGCGGTCTCCGTCGTCAGGATCA | |
| | TGTGATCCATTTT (SEQ ID NO: 417) | |
| 418 | CTAGGAAGGTGGATCACCTGGTTTTAGAGCTAG | 5′ pegRNA |
| | AAATAGCAAGTTAAAATAAGGCTAGTCCGTTAT | |
| | CAACTTGAAAAAGTGGCACCGAGTCGGTGCGGC | |
| | TTGTCGACGACGGCGGTCTCCGTCGTCAGGATCA | |
| | TGTGATCCA (SEQ ID NO: 418) | |
| 419 | CTAGGAAGGTGGATCACCTGGTTTTAGAGCTAG | 5′ pegRNA, transcription |
| | AAATAGCAAGTTAAAATAAGGCTAGTCCGTTAT | adaptation (3′ TTTT) |
| | CAACTTGAAAAAGTGGCACCGAGTCGGTGCGGC | |
| | TTGTCGACGACGGCGGTCTCCGTCGTCAGGATCA | |
| | TGTGATCCACCATTTT (SEQ ID NO: 419) | |
| 420 | CTAGGAAGGTGGATCACCTGGTTTTAGAGCTAG | 5′ pegRNA |
| | AAATAGCAAGTTAAAATAAGGCTAGTCCGTTAT | |
| | CAACTTGAAAAAGTGGCACCGAGTCGGTGCGGC | |
| | TTGTCGACGACGGCGGTCTCCGTCGTCAGGATCA | |
| | TGTGATCCACCA (SEQ ID NO: 420) | |
| 421 | CTAGGAAGGTGGATCACCTGGTTTTAGAGCTAG | 5′ pegRNA, transcription |
| | AAATAGCAAGTTAAAATAAGGCTAGTCCGTTAT | adaptation (3′ TTTT) |
| | CAACTTGAAAAAGTGGCACCGAGTCGGTGCGGC | |
| | TTGTCGACGACGGCGGTCTCCGTCGTCAGGATCA | |
| | TGTGATCCACCTTCTTTT (SEQ ID NO: 421) | |

TABLE 7
Exemplary 5′ PEgRNA and component sequence

| Sequence | | |
|---|---|---|
| number | Sequence | Description |
| 422 | CTTTGGGAGGCCTAGGAAGG (SEQ ID NO: 422) | 5′ Spacer |
| 423 | TGGGAGGCCTAGGAAGG (SEQ ID NO: 423) | 5′ Spacer |
| 424 | TTGGGAGGCCTAGGAAGG (SEQ ID NO: 424) | 5′ Spacer |
| 425 | TTTGGGAGGCCTAGGAAGG (SEQ ID NO: 425) | 5′ Spacer |
| 426 | ACTTTGGGAGGCCTAGGAAGG (SEQ ID NO: 426) | 5′ Spacer |
| 427 | CACTTTGGGAGGCCTAGGAAGG (SEQ ID NO: 427) | 5′ Spacer |
| 428 | TCCTA | 5′ PBS |
| 429 | TCCTAG | 5′ PBS |
| 430 | TCCTAGG | 5′ PBS |
| 431 | TCCTAGGC | 5′ PBS |
| 432 | TCCTAGGCC | 5′ PBS |
| 433 | TCCTAGGCCT (SEQ ID NO: 433) | 5′ PBS |
| 434 | TCCTAGGCCTC (SEQ ID NO: 434) | 5′ PBS |
| 435 | TCCTAGGCCTCC (SEQ ID NO: 435) | 5′ PBS |
| 436 | TCCTAGGCCTCCC (SEQ ID NO: 436) | 5′ PBS |
| 437 | TCCTAGGCCTCCCA (SEQ ID NO: 437) | 5′ PBS |
| 438 | TCCTAGGCCTCCCAA (SEQ ID NO: 438) | 5′ PBS |
| 439 | TCCTAGGCCTCCCAAA (SEQ ID NO: 439) | 5′ PBS |
| 440 | TCCTAGGCCTCCCAAAG (SEQ ID NO: 440) | 5′ PBS |
| 441 | TCCTAGGCCTCCCAAAGT (SEQ ID NO: 441) | 5′ PBS |
| 442 | TCCTAGGCCTCCCAAAGTG (SEQ ID NO: 442) | 5′ PBS |
| 443 | CTTTGGGAGGCCTAGGAAGGGTTTTAGAGCTAG | 5′ pegRNA |
| | AAATAGCAAGTTAAAATAAGGCTAGTCCGTTAT | |
| | CAACTTGAAAAAGTGGCACCGAGTCGGTGCGGC | |
| | TTGTCGACGACGGCGGTCTCCGTCGTCAGGATCA | |
| | TTCCTAGGCCT (SEQ ID NO: 443) | |
| 444 | GCTTTGGGAGGCCTAGGAAGGGTTTTAGAGCTA | 5′ pegRNA, transcription |
| | GAAATAGCAAGTTAAAATAAGGCTAGTCCGTTA | adaptation (5′G, |
| | TCAACTTGAAAAAGTGGCACCGAGTCGGTGCGG | 3′TTTTTTT) |
| | CTTGTCGACGACGGCGGTCTCCGTCGTCAGGATC | |
| | ATTCCTAGGCCTTTTTTTT (SEQ ID NO: 444) | |
| 445 | CTTTGGGAGGCCTAGGAAGGGTTTTAGAGCTAG | 5′ pegRNA |
| | AAATAGCAAGTTAAAATAAGGCTAGTCCGTTAT | |
| | CAACTTGAAAAAGTGGCACCGAGTCGGTGCGGC | |
| | TTGTCGACGACGGCGGTCTCCGTCGTCAGGATCA | |
| | TTCCTAGGCCTCC (SEQ ID NO: 445) | |
| 446 | GCTTTGGGAGGCCTAGGAAGGGTTTTAGAGCTA | 5′ pegRNA, transcription |
| | GAAATAGCAAGTTAAAATAAGGCTAGTCCGTTA | adaptation (5′G, |
| | TCAACTTGAAAAAGTGGCACCGAGTCGGTGCGG | 3′TTTTTTT) |
| | CTTGTCGACGACGGCGGTCTCCGTCGTCAGGATC | |
| | ATTCCTAGGCCTCCTTTTTTT (SEQ ID NO: 446) | |
| 447 | CTTTGGGAGGCCTAGGAAGGGTTTTAGAGCTAG | 5′ pegRNA, transcription |
| | AAATAGCAAGTTAAAATAAGGCTAGTCCGTTAT | adaptation (3′ TTTT) |
| | CAACTTGAAAAAGTGGCACCGAGTCGGTGCGGC | |
| | TTGTCGACGACGGCGGTCTCCGTCGTCAGGATCA | |
| | TTCCTAGGCTTTT (SEQ ID NO: 447) | |
| 448 | CTTTGGGAGGCCTAGGAAGGGTTTTAGAGCTAG | 5′ pegRNA |
| | AAATAGCAAGTTAAAATAAGGCTAGTCCGTTAT | |
| | CAACTTGAAAAAGTGGCACCGAGTCGGTGCGGC | |
| | TTGTCGACGACGGCGGTCTCCGTCGTCAGGATCA | |
| | TTCCTAGGC (SEQ ID NO: 448) | |
| 449 | CTTTGGGAGGCCTAGGAAGGGTTTTAGAGCTAG | 5′ pegRNA, transcription |
| | AAATAGCAAGTTAAAATAAGGCTAGTCCGTTAT | adaptation (3′ TTTT) |
| | CAACTTGAAAAAGTGGCACCGAGTCGGTGCGGC | |
| | TTGTCGACGACGGCGGTCTCCGTCGTCAGGATCA | |
| | TTCCTAGGCCTTTTT (SEQ ID NO: 449) | |
| 450 | CTTTGGGAGGCCTAGGAAGGGTTTTAGAGCTAG | 5′ pegRNA, transcription |
| | AAATAGCAAGTTAAAATAAGGCTAGTCCGTTAT | adaptation (3′ TTTT) |
| | CAACTTGAAAAAGTGGCACCGAGTCGGTGCGGC | |
| | TTGTCGACGACGGCGGTCTCCGTCGTCAGGATCA | |
| | TTCCTAGGCCTCCTTTT (SEQ ID NO: 450) | |

TABLE 8
Exemplary 5′ PEgRNA and component sequence

| Sequence | | |
|---|---|---|
| number | Sequence | Description |
| 451 | CATAATCTCAGCACTTTGGG (SEQ ID NO: 451) | 5′ Spacer |
| 452 | AATCTCAGCACTTTGGG (SEQ ID NO: 452) | 5′ Spacer |
| 453 | TAATCTCAGCACTTTGGG (SEQ ID NO: 453) | 5′ Spacer |
| 454 | ATAATCTCAGCACTTTGGG (SEQ ID NO: 454) | 5′ Spacer |
| 455 | CCATAATCTCAGCACTTTGGG (SEQ ID NO: 455) | 5′ Spacer |
| 456 | CCCATAATCTCAGCACTTTGGG (SEQ ID NO: 456) | 5′ Spacer |
| 457 | AAAGT | 5′ PBS |
| 458 | AAAGTG | 5′ PBS |
| 459 | AAAGTGC | 5′ PBS |
| 460 | AAAGTGCT | 5′ PBS |
| 461 | AAAGTGCTG | 5′ PBS |
| 462 | AAAGTGCTGA (SEQ ID NO: 462) | 5′ PBS |
| 463 | AAAGTGCTGAG (SEQ ID NO: 463) | 5′ PBS |
| 464 | AAAGTGCTGAGA (SEQ ID NO: 464) | 5′ PBS |
| 465 | AAAGTGCTGAGAT (SEQ ID NO: 465) | 5′ PBS |
| 466 | AAAGTGCTGAGATT (SEQ ID NO: 466) | 5′ PBS |
| 467 | AAAGTGCTGAGATTA (SEQ ID NO: 467) | 5′ PBS |
| 468 | AAAGTGCTGAGATTAT (SEQ ID NO: 468) | 5′ PBS |
| 469 | AAAGTGCTGAGATTATG (SEQ ID NO: 469) | 5′ PBS |
| 470 | AAAGTGCTGAGATTATGG (SEQ ID NO: 470) | 5′ PBS |
| 471 | AAAGTGCTGAGATTATGGG (SEQ ID NO: 471) | 5′ PBS |
| 472 | CATAATCTCAGCACTTTGGGGTTTTAGAGCTAGA | 5′ pegRNA |
| | AATAGCAAGTTAAAATAAGGCTAGTCCGTTATC | |
| | AACTTGAAAAAGTGGCACCGAGTCGGTGCGGCT | |
| | TGTCGACGACGGCGGTCTCCGTCGTCAGGATCAT | |
| | AAAGTGCTGA (SEQ ID NO: 472) | |
| 473 | GCATAATCTCAGCACTTTGGGGTTTTAGAGCTAG | 5′ pegRNA, transcription |
| | AAATAGCAAGTTAAAATAAGGCTAGTCCGTTAT | adaptation (5′G, |
| | CAACTTGAAAAAGTGGCACCGAGTCGGTGCGGC | 3′TTTTTTT) |
| | TTGTCGACGACGGCGGTCTCCGTCGTCAGGATCA | |
| | TAAAGTGCTGATTTTTTT (SEQ ID NO: 473) | |
| 474 | CATAATCTCAGCACTTTGGGGTTTTAGAGCTAGA | 5′ pegRNA |
| | AATAGCAAGTTAAAATAAGGCTAGTCCGTTATC | |
| | AACTTGAAAAAGTGGCACCGAGTCGGTGCGGCT | |
| | TGTCGACGACGGCGGTCTCCGTCGTCAGGATCAT | |
| | AAAGTGCTGAGA (SEQ ID NO: 474) | |
| 475 | GCATAATCTCAGCACTTTGGGGTTTTAGAGCTAG | 5′ pegRNA, transcription |
| | AAATAGCAAGTTAAAATAAGGCTAGTCCGTTAT | adaptation (5′G, |
| | CAACTTGAAAAAGTGGCACCGAGTCGGTGCGGC | 3′TTTTTTT, 3′A) |
| | TTGTCGACGACGGCGGTCTCCGTCGTCAGGATCA | |
| | TAAAGTGCTGAGAATTTTTTT (SEQ ID NO: 475) | |
| 477 | CATAATCTCAGCACTTTGGGGTTTTAGAGCTAGA | 5′ pegRNA, transcription |
| | AATAGCAAGTTAAAATAAGGCTAGTCCGTTATC | adaptation (3′ TTTT) |
| | AACTTGAAAAAGTGGCACCGAGTCGGTGCGGCT | |
| | TGTCGACGACGGCGGTCTCCGTCGTCAGGATCAT | |
| | AAAGTGCTTTTT (SEQ ID NO: 477) | |
| 478 | CATAATCTCAGCACTTTGGGGTTTTAGAGCTAGA | 5′ pegRNA |
| | AATAGCAAGTTAAAATAAGGCTAGTCCGTTATC | |
| | AACTTGAAAAAGTGGCACCGAGTCGGTGCGGCT | |
| | TGTCGACGACGGCGGTCTCCGTCGTCAGGATCAT | |
| | AAAGTGCT (SEQ ID NO: 478) | |
| 479 | CATAATCTCAGCACTTTGGGGTTTTAGAGCTAGA | 5′ pegRNA, transcription |
| | AATAGCAAGTTAAAATAAGGCTAGTCCGTTATC | adaptation (3′ TTTT) |
| | AACTTGAAAAAGTGGCACCGAGTCGGTGCGGCT | |
| | TGTCGACGACGGCGGTCTCCGTCGTCAGGATCAT | |
| | AAAGTGCTGATTTT (SEQ ID NO: 479) | |
| 480 | CATAATCTCAGCACTTTGGGGTTTTAGAGCTAGA | 5′ pegRNA, transcription |
| | AATAGCAAGTTAAAATAAGGCTAGTCCGTTATC | adaptation (3′ TTTT) |
| | AACTTGAAAAAGTGGCACCGAGTCGGTGCGGCT | |
| | TGTCGACGACGGCGGTCTCCGTCGTCAGGATCAT | |
| | AAAGTGCTGAGAATTTT (SEQ ID NO: 480) | |
| 481 | CATAATCTCAGCACTTTGGGGTTTTAGAGCTAGA | 5′ pegRNA |
| | AATAGCAAGTTAAAATAAGGCTAGTCCGTTATC | |
| | AACTTGAAAAAGTGGCACCGAGTCGGTGCGGCT | |
| | TGTCGACGACGGCGGTCTCCGTCGTCAGGATCAT | |
| | AAAGTGCTGAGAA (SEQ ID NO: 481) | |

TABLE 9
Exemplary 3′ PEgRNA and component sequence

| Sequence | | |
|---|---|---|
| number | Sequence | Description |
| 482 | CAGGCGCGCGACACCACGCC (SEQ ID NO: 482) | 3′ Spacer |
| 483 | GCGCGCGACACCACGCC (SEQ ID NO: 483) | 3′ Spacer |
| 484 | GGCGCGCGACACCACGCC (SEQ ID NO: 484) | 3′ Spacer |
| 485 | AGGCGCGCGACACCACGCC (SEQ ID NO: 485) | 3′ Spacer |
| 486 | ACAGGCGCGCGACACCACGCC (SEQ ID NO: 486) | 3′ Spacer |
| 487 | TACAGGCGCGCGACACCACGCC (SEQ ID NO: 487) | 3′ Spacer |
| 488 | GTGGT | 3′ PBS |
| 489 | GTGGTG | 3′ PBS |
| 490 | GTGGTGT | 3′ PBS |
| 491 | GTGGTGTC | 3′ PBS |
| 492 | GTGGTGTCG | 3′ PBS |
| 493 | GTGGTGTCGC (SEQ ID NO: 493) | 3′ PBS |
| 494 | GTGGTGTCGCG (SEQ ID NO: 494) | 3′ PBS |
| 495 | GTGGTGTCGCGC (SEQ ID NO: 495) | 3′ PBS |
| 496 | GTGGTGTCGCGCG (SEQ ID NO: 496) | 3′ PBS |
| 497 | GTGGTGTCGCGCGC (SEQ ID NO: 497) | 3′ PBS |
| 498 | GTGGTGTCGCGCGCC (SEQ ID NO: 498) | 3′ PBS |
| 499 | GTGGTGTCGCGCGCCT (SEQ ID NO: 499) | 3′ PBS |
| 500 | GTGGTGTCGCGCGCCTG (SEQ ID NO: 500) | 3′ PBS |
| 501 | GTGGTGTCGCGCGCCTGT (SEQ ID NO: 501) | 3′ PBS |
| 502 | GTGGTGTCGCGCGCCTGTA (SEQ ID NO: 502) | 3′ PBS |
| 503 | CAGGCGCGCGACACCACGCCGTTTTAGAGCTAG | 3′ pegRNA |
| | AAATAGCAAGTTAAAATAAGGCTAGTCCGTTAT | |
| | CAACTTGAAAAAGTGGCACCGAGTCGGTGCATG | |
| | ATCCTGACGACGGAGACCGCCGTCGTCGACAAG | |
| | CCGTGGTGTCGC (SEQ ID NO: 503) | |
| 504 | GCAGGCGCGCGACACCACGCCGTTTTAGAGCTA | 3′ pegRNA, transcription |
| | GAAATAGCAAGTTAAAATAAGGCTAGTCCGTTA | adaptation (5′G, |
| | TCAACTTGAAAAAGTGGCACCGAGTCGGTGCAT | 3′TTTTTTT) |
| | GATCCTGACGACGGAGACCGCCGTCGTCGACAA | |
| | GCCGTGGTGTCGCTTTTTTT (SEQ ID NO: 504) | |
| 505 | CAGGCGCGCGACACCACGCCGTTTTAGAGCTAG | 3′ pegRNA |
| | AAATAGCAAGTTAAAATAAGGCTAGTCCGTTAT | |
| | CAACTTGAAAAAGTGGCACCGAGTCGGTGCATG | |
| | ATCCTGACGACGGAGACCGCCGTCGTCGACAAG | |
| | CCGTGGTGTCGCGC (SEQ ID NO: 505) | |
| 506 | GCAGGCGCGCGACACCACGCCGTTTTAGAGCTA | 3′ pegRNA, transcription |
| | GAAATAGCAAGTTAAAATAAGGCTAGTCCGTTA | adaptation (5′G, |
| | TCAACTTGAAAAAGTGGCACCGAGTCGGTGCAT | 3′TTTTTTT) |
| | GATCCTGACGACGGAGACCGCCGTCGTCGACAA | |
| | GCCGTGGTGTCGCGCTTTTTTT (SEQ ID NO: 506) | |
| 507 | CAGGCGCGCGACACCACGCCGTTTTAGAGCTAG | 3′ pegRNA, transcription |
| | AAATAGCAAGTTAAAATAAGGCTAGTCCGTTAT | adaptation (3′TTTT) |
| | CAACTTGAAAAAGTGGCACCGAGTCGGTGCATG | |
| | ATCCTGACGACGGAGACCGCCGTCGTCGACAAG | |
| | CCGTGGTGTCTTTT (SEQ ID NO: 507) | |
| 508 | CAGGCGCGCGACACCACGCCGTTTTAGAGCTAG | 3′ pegRNA |
| | AAATAGCAAGTTAAAATAAGGCTAGTCCGTTAT | |
| | CAACTTGAAAAAGTGGCACCGAGTCGGTGCATG | |
| | ATCCTGACGACGGAGACCGCCGTCGTCGACAAG | |
| | CCGTGGTGTC (SEQ ID NO: 508) | |
| 509 | CAGGCGCGCGACACCACGCCGTTTTAGAGCTAG | 3′ pegRNA, transcription |
| | AAATAGCAAGTTAAAATAAGGCTAGTCCGTTAT | adaptation (3′TTTT) |
| | CAACTTGAAAAAGTGGCACCGAGTCGGTGCATG | |
| | ATCCTGACGACGGAGACCGCCGTCGTCGACAAG | |
| | CCGTGGTGTCGCTTTT (SEQ ID NO: 509) | |
| 510 | CAGGCGCGCGACACCACGCCGTTTTAGAGCTAG | 3′ pegRNA, transcription |
| | AAATAGCAAGTTAAAATAAGGCTAGTCCGTTAT | adaptation (3′TTTT) |
| | CAACTTGAAAAAGTGGCACCGAGTCGGTGCATG | |
| | ATCCTGACGACGGAGACCGCCGTCGTCGACAAG | |
| | CCGTGGTGTCGCGCTTTT (SEQ ID NO: 510) | |

TABLE 10
Exemplary 3′ PEgRNA and component sequence

| Sequence | | |
|---|---|---|
| number | Sequence | Description |
| 511 | CCGCAGCCTCTGGAGTAGCT (SEQ ID NO: 511) | 3′ Spacer |
| 512 | CAGCCTCTGGAGTAGCT (SEQ ID NO: 512) | 3′ Spacer |
| 513 | GCAGCCTCTGGAGTAGCT (SEQ ID NO: 513) | 3′ Spacer |
| 514 | CGCAGCCTCTGGAGTAGCT (SEQ ID NO: 514) | 3′ Spacer |
| 515 | GCCGCAGCCTCTGGAGTAGCT (SEQ ID NO: 515) | 3′ Spacer |
| 516 | TGCCGCAGCCTCTGGAGTAGCT (SEQ ID NO: 516) | 3′ Spacer |
| 517 | TACTC | 3′ PBS |
| 518 | TACTCC | 3′ PBS |
| 519 | TACTCCA | 3′ PBS |
| 520 | TACTCCAG | 3′ PBS |
| 521 | TACTCCAGA | 3′ PBS |
| 522 | TACTCCAGAG (SEQ ID NO: 522) | 3′ PBS |
| 523 | TACTCCAGAGG (SEQ ID NO: 523) | 3′ PBS |
| 524 | TACTCCAGAGGC (SEQ ID NO: 524) | 3′ PBS |
| 525 | TACTCCAGAGGCT (SEQ ID NO: 525) | 3′ PBS |
| 526 | TACTCCAGAGGCTG (SEQ ID NO: 526) | 3′ PBS |
| 527 | TACTCCAGAGGCTGC (SEQ ID NO: 527) | 3′ PBS |
| 528 | TACTCCAGAGGCTGCG (SEQ ID NO: 528) | 3′ PBS |
| 529 | TACTCCAGAGGCTGCGG (SEQ ID NO: 529) | 3′ PBS |
| 530 | TACTCCAGAGGCTGCGGC (SEQ ID NO: 530) | 3′ PBS |
| 531 | TACTCCAGAGGCTGCGGCA (SEQ ID NO: 531) | 3′ PBS |
| 532 | CCGCAGCCTCTGGAGTAGCTGTTTTAGAGCTAGA | 3′ pegRNA |
| | AATAGCAAGTTAAAATAAGGCTAGTCCGTTATC | |
| | AACTTGAAAAAGTGGCACCGAGTCGGTGCATGA | |
| | TCCTGACGACGGAGACCGCCGTCGTCGACAAGC | |
| | CTACTCCAGAG (SEQ ID NO: 532) | |
| 533 | GCCGCAGCCTCTGGAGTAGCTGTTTTAGAGCTAG | 3′ pegRNA, transcription |
| | AAATAGCAAGTTAAAATAAGGCTAGTCCGTTAT | adaptation (5′G, |
| | CAACTTGAAAAAGTGGCACCGAGTCGGTGCATG | 3′TTTTTTT) |
| | ATCCTGACGACGGAGACCGCCGTCGTCGACAAG | |
| | CCTACTCCAGAGTTTTTTT (SEQ ID NO: 533) | |
| 534 | CCGCAGCCTCTGGAGTAGCTGTTTTAGAGCTAGA | 3′ pegRNA |
| | AATAGCAAGTTAAAATAAGGCTAGTCCGTTATC | |
| | AACTTGAAAAAGTGGCACCGAGTCGGTGCATGA | |
| | TCCTGACGACGGAGACCGCCGTCGTCGACAAGC | |
| | CTACTCCAGAGGC (SEQ ID NO: 534) | |
| 535 | GCCGCAGCCTCTGGAGTAGCTGTTTTAGAGCTAG | 3′ pegRNA, transcription |
| | AAATAGCAAGTTAAAATAAGGCTAGTCCGTTAT | adaptation (5′G, |
| | CAACTTGAAAAAGTGGCACCGAGTCGGTGCATG | 3′TTTTTTT, 3′A) |
| | ATCCTGACGACGGAGACCGCCGTCGTCGACAAG | |
| | CCTACTCCAGAGGCATTTTTTT (SEQ ID NO: 535) | |
| 537 | CCGCAGCCTCTGGAGTAGCTGTTTTAGAGCTAGA | 3′ pegRNA, transcription |
| | AATAGCAAGTTAAAATAAGGCTAGTCCGTTATC | adaptation (3′TTTT) |
| | AACTTGAAAAAGTGGCACCGAGTCGGTGCATGA | |
| | TCCTGACGACGGAGACCGCCGTCGTCGACAAGC | |
| | CTACTCCAGTTTT (SEQ ID NO: 537) | |
| 538 | CCGCAGCCTCTGGAGTAGCTGTTTTAGAGCTAGA | 3′ pegRNA |
| | AATAGCAAGTTAAAATAAGGCTAGTCCGTTATC | |
| | AACTTGAAAAAGTGGCACCGAGTCGGTGCATGA | |
| | TCCTGACGACGGAGACCGCCGTCGTCGACAAGC | |
| | CTACTCCAG (SEQ ID NO: 538) | |
| 539 | CCGCAGCCTCTGGAGTAGCTGTTTTAGAGCTAGA | 3′ pegRNA, transcription |
| | AATAGCAAGTTAAAATAAGGCTAGTCCGTTATC | adaptation (3′TTTT) |
| | AACTTGAAAAAGTGGCACCGAGTCGGTGCATGA | |
| | TCCTGACGACGGAGACCGCCGTCGTCGACAAGC | |
| | CTACTCCAGAGTTTT (SEQ ID NO: 539) | |
| 540 | CCGCAGCCTCTGGAGTAGCTGTTTTAGAGCTAGA | 3′ pegRNA, transcription |
| | AATAGCAAGTTAAAATAAGGCTAGTCCGTTATC | adaptation (3′TTTT) |
| | AACTTGAAAAAGTGGCACCGAGTCGGTGCATGA | |
| | TCCTGACGACGGAGACCGCCGTCGTCGACAAGC | |
| | CTACTCCAGAGGCATTTT (SEQ ID NO: 540) | |
| 541 | CCGCAGCCTCTGGAGTAGCTGTTTTAGAGCTAGA | 3′ pegRNA |
| | AATAGCAAGTTAAAATAAGGCTAGTCCGTTATC | |
| | AACTTGAAAAAGTGGCACCGAGTCGGTGCATGA | |
| | TCCTGACGACGGAGACCGCCGTCGTCGACAAGC | |
| | CTACTCCAGAGGCA (SEQ ID NO: 541) | |

TABLE 11
Exemplary 3′ PEgRNA and component sequence

| Sequence | | |
|---|---|---|
| number | Sequence | Description |
| 542 | GGAGTCTTGCTCTGTCGCCC (SEQ ID NO: 542) | 3′ Spacer |
| 543 | GTCTTGCTCTGTCGCCC (SEQ ID NO: 543) | 3′ Spacer |
| 544 | AGTCTTGCTCTGTCGCCC (SEQ ID NO: 544) | 3′ Spacer |
| 545 | GAGTCTTGCTCTGTCGCCC (SEQ ID NO: 545) | 3′ Spacer |
| 546 | CGGAGTCTTGCTCTGTCGCCC (SEQ ID NO: 546) | 3′ Spacer |
| 547 | ACGGAGTCTTGCTCTGTCGCCC (SEQ ID NO: 547) | 3′ Spacer |
| 548 | CGACA | 3′ PBS |
| 549 | CGACAG | 3′ PBS |
| 550 | CGACAGA | 3′ PBS |
| 551 | CGACAGAG | 3′ PBS |
| 552 | CGACAGAGC | 3′ PBS |
| 553 | CGACAGAGCA (SEQ ID NO: 553) | 3′ PBS |
| 554 | CGACAGAGCAA (SEQ ID NO: 554) | 3′ PBS |
| 555 | CGACAGAGCAAG (SEQ ID NO: 555) | 3′ PBS |
| 556 | CGACAGAGCAAGA (SEQ ID NO: 556) | 3′ PBS |
| 557 | CGACAGAGCAAGAC (SEQ ID NO: 557) | 3′ PBS |
| 558 | CGACAGAGCAAGACT (SEQ ID NO: 558) | 3′ PBS |
| 559 | CGACAGAGCAAGACTC (SEQ ID NO: 559) | 3′ PBS |
| 560 | CGACAGAGCAAGACTCC (SEQ ID NO: 560) | 3′ PBS |
| 561 | CGACAGAGCAAGACTCCG (SEQ ID NO: 561) | 3′ PBS |
| 562 | CGACAGAGCAAGACTCCGT (SEQ ID NO: 562) | 3′ PBS |
| 563 | GGAGTCTTGCTCTGTCGCCCGTTTTAGAGCTAGA | 3′ pegRNA |
| | AATAGCAAGTTAAAATAAGGCTAGTCCGTTATC | |
| | AACTTGAAAAAGTGGCACCGAGTCGGTGCATGA | |
| | TCCTGACGACGGAGACCGCCGTCGTCGACAAGC | |
| | CCGACAGAGCA (SEQ ID NO: 563) | |
| 564 | GGAGTCTTGCTCTGTCGCCCGTTTTAGAGCTAGA | 3′ pegRNA, transcription |
| | AATAGCAAGTTAAAATAAGGCTAGTCCGTTATC | adaptation (3′TTTTTTT) |
| | AACTTGAAAAAGTGGCACCGAGTCGGTGCATGA | |
| | TCCTGACGACGGAGACCGCCGTCGTCGACAAGC | |
| | CCGACAGAGCATTTTTTT (SEQ ID NO: 564) | |
| 565 | GGAGTCTTGCTCTGTCGCCCGTTTTAGAGCTAGA | 3′ pegRNA |
| | AATAGCAAGTTAAAATAAGGCTAGTCCGTTATC | |
| | AACTTGAAAAAGTGGCACCGAGTCGGTGCATGA | |
| | TCCTGACGACGGAGACCGCCGTCGTCGACAAGC | |
| | CCGACAGAGCAAG (SEQ ID NO: 565) | |
| 566 | GGAGTCTTGCTCTGTCGCCCGTTTTAGAGCTAGA | 3′ pegRNA, transcription |
| | AATAGCAAGTTAAAATAAGGCTAGTCCGTTATC | adaptation (3′TTTTTTT) |
| | AACTTGAAAAAGTGGCACCGAGTCGGTGCATGA | |
| | TCCTGACGACGGAGACCGCCGTCGTCGACAAGC | |
| | CCGACAGAGCAAGTTTTTTT (SEQ ID NO: 566) | |
| 567 | GGAGTCTTGCTCTGTCGCCCGTTTTAGAGCTAGA | 3′ pegRNA, transcription |
| | AATAGCAAGTTAAAATAAGGCTAGTCCGTTATC | adaptation (3′TTTT) |
| | AACTTGAAAAAGTGGCACCGAGTCGGTGCATGA | |
| | TCCTGACGACGGAGACCGCCGTCGTCGACAAGC | |
| | CCGACAGAGTTTT (SEQ ID NO: 567) | |
| 568 | GGAGTCTTGCTCTGTCGCCCGTTTTAGAGCTAGA | 3′ pegRNA |
| | AATAGCAAGTTAAAATAAGGCTAGTCCGTTATC | |
| | AACTTGAAAAAGTGGCACCGAGTCGGTGCATGA | |
| | TCCTGACGACGGAGACCGCCGTCGTCGACAAGC | |
| | CCGACAGAG (SEQ ID NO: 568) | |
| 569 | GGAGTCTTGCTCTGTCGCCCGTTTTAGAGCTAGA | 3′ pegRNA, transcription |
| | AATAGCAAGTTAAAATAAGGCTAGTCCGTTATC | adaptation (3′TTTT) |
| | AACTTGAAAAAGTGGCACCGAGTCGGTGCATGA | |
| | TCCTGACGACGGAGACCGCCGTCGTCGACAAGC | |
| | CCGACAGAGCATTTT (SEQ ID NO: 569) | |
| 570 | GGAGTCTTGCTCTGTCGCCCGTTTTAGAGCTAGA | 3′ pegRNA, transcription |
| | AATAGCAAGTTAAAATAAGGCTAGTCCGTTATC | adaptation (3′TTTT) |
| | AACTTGAAAAAGTGGCACCGAGTCGGTGCATGA | |
| | TCCTGACGACGGAGACCGCCGTCGTCGACAAGC | |
| | CCGACAGAGCAAGTTTT (SEQ ID NO: 570) | |

TABLE 12
Exemplary 3′ PEgRNA and component sequence

| Sequence | | |
|---|---|---|
| number | Sequence | Description |
| 571 | AGGAGATCTAAGGACCATCA (SEQ ID NO: 571) | 3′ Spacer |
| 572 | AGATCTAAGGACCATCA (SEQ ID NO: 572) | 3′ Spacer |
| 573 | GAGATCTAAGGACCATCA (SEQ ID NO: 573) | 3′ Spacer |
| 574 | GGAGATCTAAGGACCATCA (SEQ ID NO: 574) | 3′ Spacer |
| 575 | GAGGAGATCTAAGGACCATCA (SEQ ID NO: 575) | 3′ Spacer |
| 576 | AGAGGAGATCTAAGGACCATCA (SEQ ID NO: | 3′ Spacer |
| | 576) | |
| 577 | TGGTC | 3′ PBS |
| 578 | TGGTCC | 3′ PBS |
| 579 | TGGTCCT | 3′ PBS |
| 580 | TGGTCCTT | 3′ PBS |
| 581 | TGGTCCTTA | 3′ PBS |
| 582 | TGGTCCTTAG (SEQ ID NO: 582) | 3′ PBS |
| 583 | TGGTCCTTAGA (SEQ ID NO: 583) | 3′ PBS |
| 584 | TGGTCCTTAGAT (SEQ ID NO: 584) | 3′ PBS |
| 585 | TGGTCCTTAGATC (SEQ ID NO: 585) | 3′ PBS |
| 586 | TGGTCCTTAGATCT (SEQ ID NO: 586) | 3′ PBS |
| 587 | TGGTCCTTAGATCTC (SEQ ID NO: 587) | 3′ PBS |
| 588 | TGGTCCTTAGATCTCC (SEQ ID NO: 588) | 3′ PBS |
| 589 | TGGTCCTTAGATCTCCT (SEQ ID NO: 589) | 3′ PBS |
| 590 | TGGTCCTTAGATCTCCTC (SEQ ID NO: 590) | 3′ PBS |
| 591 | TGGTCCTTAGATCTCCTCT (SEQ ID NO: 591) | 3′ PBS |
| 592 | AGGAGATCTAAGGACCATCAGTTTTAGAGCTAG | 3′ pegRNA |
| | AAATAGCAAGTTAAAATAAGGCTAGTCCGTTAT | |
| | CAACTTGAAAAAGTGGCACCGAGTCGGTGCATG | |
| | ATCCTGACGACGGAGACCGCCGTCGTCGACAAG | |
| | CCTGGTCCTTAG (SEQ ID NO: 592) | |
| 593 | GAGGAGATCTAAGGACCATCAGTTTTAGAGCTA | 3′ pegRNA, transcription |
| | GAAATAGCAAGTTAAAATAAGGCTAGTCCGTTA | adaptation (5′G, |
| | TCAACTTGAAAAAGTGGCACCGAGTCGGTGCAT | 3′TTTTTTT) |
| | GATCCTGACGACGGAGACCGCCGTCGTCGACAA | |
| | GCCTGGTCCTTAGTTTTTTT (SEQ ID NO: 593) | |
| 594 | AGGAGATCTAAGGACCATCAGTTTTAGAGCTAG | 3′ pegRNA |
| | AAATAGCAAGTTAAAATAAGGCTAGTCCGTTAT | |
| | CAACTTGAAAAAGTGGCACCGAGTCGGTGCATG | |
| | ATCCTGACGACGGAGACCGCCGTCGTCGACAAG | |
| | CCTGGTCCTTAGAT (SEQ ID NO: 594) | |
| 595 | GAGGAGATCTAAGGACCATCAGTTTTAGAGCTA | 3′ pegRNA, transcription |
| | GAAATAGCAAGTTAAAATAAGGCTAGTCCGTTA | adaptation (5′G, |
| | TCAACTTGAAAAAGTGGCACCGAGTCGGTGCAT | 3′TTTTTTT) |
| | GATCCTGACGACGGAGACCGCCGTCGTCGACAA | |
| | GCCTGGTCCTTAGATTTTTTTT (SEQ ID NO: 595) | |
| 596 | AGGAGATCTAAGGACCATCAGTTTTAGAGCTAG | 3′ pegRNA, transcription |
| | AAATAGCAAGTTAAAATAAGGCTAGTCCGTTAT | adaptation (3′TTTT) |
| | CAACTTGAAAAAGTGGCACCGAGTCGGTGCATG | |
| | ATCCTGACGACGGAGACCGCCGTCGTCGACAAG | |
| | CCTGGTCCTTTTTT (SEQ ID NO: 596) | |
| 597 | AGGAGATCTAAGGACCATCAGTTTTAGAGCTAG | 3′ pegRNA |
| | AAATAGCAAGTTAAAATAAGGCTAGTCCGTTAT | |
| | CAACTTGAAAAAGTGGCACCGAGTCGGTGCATG | |
| | ATCCTGACGACGGAGACCGCCGTCGTCGACAAG | |
| | CCTGGTCCTT (SEQ ID NO: 597) | |
| 598 | AGGAGATCTAAGGACCATCAGTTTTAGAGCTAG | 3′ pegRNA, transcription |
| | AAATAGCAAGTTAAAATAAGGCTAGTCCGTTAT | adaptation (3′TTTT) |
| | CAACTTGAAAAAGTGGCACCGAGTCGGTGCATG | |
| | ATCCTGACGACGGAGACCGCCGTCGTCGACAAG | |
| | CCTGGTCCTTAGTTTT (SEQ ID NO: 598) | |
| 599 | AGGAGATCTAAGGACCATCAGTTTTAGAGCTAG | 3′ pegRNA, transcription |
| | AAATAGCAAGTTAAAATAAGGCTAGTCCGTTAT | adaptation (3′TTTT) |
| | CAACTTGAAAAAGTGGCACCGAGTCGGTGCATG | |
| | ATCCTGACGACGGAGACCGCCGTCGTCGACAAG | |
| | CCTGGTCCTTAGATTTTT (SEQ ID NO: 599) | |

TABLE 13
Exemplary 3′ PEgRNA and component sequence

| Sequence | | |
|---|---|---|
| number | Sequence | Description |
| 600 | ATAAATGTCTGCTTTCCTAG (SEQ ID NO: 600) | 3′ Spacer |
| 601 | AATGTCTGCTTTCCTAG (SEQ ID NO: 601) | 3′ Spacer |
| 602 | AAATGTCTGCTTTCCTAG (SEQ ID NO: 602) | 3′ Spacer |
| 603 | TAAATGTCTGCTTTCCTAG (SEQ ID NO: 603) | 3′ Spacer |
| 604 | AATAAATGTCTGCTTTCCTAG (SEQ ID NO: 604) | 3′ Spacer |
| 605 | TAATAAATGTCTGCTTTCCTAG (SEQ ID NO: 605) | 3′ Spacer |
| 606 | GGAAA | 3′ PBS |
| 607 | GGAAAG | 3′ PBS |
| 608 | GGAAAGC | 3′ PBS |
| 609 | GGAAAGCA | 3′ PBS |
| 610 | GGAAAGCAG | 3′ PBS |
| 611 | GGAAAGCAGA (SEQ ID NO: 611) | 3′ PBS |
| 612 | GGAAAGCAGAC (SEQ ID NO: 612) | 3′ PBS |
| 613 | GGAAAGCAGACA (SEQ ID NO: 613) | 3′ PBS |
| 614 | GGAAAGCAGACAT (SEQ ID NO: 614) | 3′ PBS |
| 615 | GGAAAGCAGACATT (SEQ ID NO: 615) | 3′ PBS |
| 616 | GGAAAGCAGACATTT (SEQ ID NO: 616) | 3′ PBS |
| 617 | GGAAAGCAGACATTTA (SEQ ID NO: 617) | 3′ PBS |
| 618 | GGAAAGCAGACATTTAT (SEQ ID NO: 618) | 3′ PBS |
| 619 | GGAAAGCAGACATTTATT (SEQ ID NO: 619) | 3′ PBS |
| 620 | GGAAAGCAGACATTTATTA (SEQ ID NO: 620) | 3′ PBS |
| 621 | ATAAATGTCTGCTTTCCTAGGTTTTAGAGCTAGA | 3′ pegRNA |
| | AATAGCAAGTTAAAATAAGGCTAGTCCGTTATC | |
| | AACTTGAAAAAGTGGCACCGAGTCGGTGCATGA | |
| | TCCTGACGACGGAGACCGCCGTCGTCGACAAGC | |
| | CGGAAAGCAGA (SEQ ID NO: 621) | |
| 622 | GATAAATGTCTGCTTTCCTAGGTTTTAGAGCTAG | 3′ pegRNA, transcription |
| | AAATAGCAAGTTAAAATAAGGCTAGTCCGTTAT | adaptation (5′G, |
| | CAACTTGAAAAAGTGGCACCGAGTCGGTGCATG | 3′TTTTTTT) |
| | ATCCTGACGACGGAGACCGCCGTCGTCGACAAG | |
| | CCGGAAAGCAGATTTTTTT (SEQ ID NO: 622) | |
| 623 | ATAAATGTCTGCTTTCCTAGGTTTTAGAGCTAGA | 3′ pegRNA |
| | AATAGCAAGTTAAAATAAGGCTAGTCCGTTATC | |
| | AACTTGAAAAAGTGGCACCGAGTCGGTGCATGA | |
| | TCCTGACGACGGAGACCGCCGTCGTCGACAAGC | |
| | CGGAAAGCAGACA (SEQ ID NO: 623) | |
| 624 | GATAAATGTCTGCTTTCCTAGGTTTTAGAGCTAG | 3′ pegRNA, transcription |
| | AAATAGCAAGTTAAAATAAGGCTAGTCCGTTAT | adaptation (5′G, |
| | CAACTTGAAAAAGTGGCACCGAGTCGGTGCATG | 3′TTTTTTT, 3′A) |
| | ATCCTGACGACGGAGACCGCCGTCGTCGACAAG | |
| | CCGGAAAGCAGACAATTTTTTT (SEQ ID NO: 624) | |
| 626 | ATAAATGTCTGCTTTCCTAGGTTTTAGAGCTAGA | 3′ pegRNA, transcription |
| | AATAGCAAGTTAAAATAAGGCTAGTCCGTTATC | adaptation (3′TTTT) |
| | AACTTGAAAAAGTGGCACCGAGTCGGTGCATGA | |
| | TCCTGACGACGGAGACCGCCGTCGTCGACAAGC | |
| | CGGAAAGCATTTT (SEQ ID NO: 626) | |
| 627 | ATAAATGTCTGCTTTCCTAGGTTTTAGAGCTAGA | 3′ pegRNA |
| | AATAGCAAGTTAAAATAAGGCTAGTCCGTTATC | |
| | AACTTGAAAAAGTGGCACCGAGTCGGTGCATGA | |
| | TCCTGACGACGGAGACCGCCGTCGTCGACAAGC | |
| | CGGAAAGCA (SEQ ID NO: 627) | |
| 628 | ATAAATGTCTGCTTTCCTAGGTTTTAGAGCTAGA | 3′ pegRNA, transcription |
| | AATAGCAAGTTAAAATAAGGCTAGTCCGTTATC | adaptation (3′TTTT) |
| | AACTTGAAAAAGTGGCACCGAGTCGGTGCATGA | |
| | TCCTGACGACGGAGACCGCCGTCGTCGACAAGC | |
| | CGGAAAGCAGATTTT (SEQ ID NO: 628) | |
| 629 | ATAAATGTCTGCTTTCCTAGGTTTTAGAGCTAGA | 3′ pegRNA, transcription |
| | AATAGCAAGTTAAAATAAGGCTAGTCCGTTATC | adaptation (3′TTTT) |
| | AACTTGAAAAAGTGGCACCGAGTCGGTGCATGA | |
| | TCCTGACGACGGAGACCGCCGTCGTCGACAAGC | |
| | CGGAAAGCAGACAATTTT (SEQ ID NO: 629) | |
| 630 | ATAAATGTCTGCTTTCCTAGGTTTTAGAGCTAGA | 3′ pegRNA |
| | AATAGCAAGTTAAAATAAGGCTAGTCCGTTATC | |
| | AACTTGAAAAAGTGGCACCGAGTCGGTGCATGA | |
| | TCCTGACGACGGAGACCGCCGTCGTCGACAAGC | |
| | CGGAAAGCAGACAA (SEQ ID NO: 630) | |

TABLE 14
Exemplary 3′ PEgRNA and component sequence

| Sequence | | |
|---|---|---|
| number | Sequence | Description |
| 631 | ACTCTGCTGATGGCCAGACG (SEQ ID NO: 631) | 3′ Spacer |
| 632 | CTGCTGATGGCCAGACG (SEQ ID NO: 632) | 3′ Spacer |
| 633 | TCTGCTGATGGCCAGACG (SEQ ID NO: 633) | 3′ Spacer |
| 634 | CTCTGCTGATGGCCAGACG (SEQ ID NO: 634) | 3′ Spacer |
| 635 | AACTCTGCTGATGGCCAGACG (SEQ ID NO: 635) | 3′ Spacer |
| 636 | AAACTCTGCTGATGGCCAGACG (SEQ ID NO: 636) | 3′ Spacer |
| 637 | CTGGC | 3′ PBS |
| 638 | CTGGCC | 3′ PBS |
| 639 | CTGGCCA | 3′ PBS |
| 640 | CTGGCCAT | 3′ PBS |
| 641 | CTGGCCATC | 3′ PBS |
| 642 | CTGGCCATCA (SEQ ID NO: 642) | 3′ PBS |
| 643 | CTGGCCATCAG (SEQ ID NO: 643) | 3′ PBS |
| 644 | CTGGCCATCAGC (SEQ ID NO: 644) | 3′ PBS |
| 645 | CTGGCCATCAGCA (SEQ ID NO: 645) | 3′ PBS |
| 646 | CTGGCCATCAGCAG (SEQ ID NO: 646) | 3′ PBS |
| 647 | CTGGCCATCAGCAGA (SEQ ID NO: 647) | 3′ PBS |
| 648 | CTGGCCATCAGCAGAG (SEQ ID NO: 648) | 3′ PBS |
| 649 | CTGGCCATCAGCAGAGT (SEQ ID NO: 649) | 3′ PBS |
| 650 | CTGGCCATCAGCAGAGTT (SEQ ID NO: 650) | 3′ PBS |
| 651 | CTGGCCATCAGCAGAGTTT (SEQ ID NO: 651) | 3′ PBS |
| 652 | ACTCTGCTGATGGCCAGACGGTTTTAGAGCTAG | 3′ pegRNA |
| | AAATAGCAAGTTAAAATAAGGCTAGTCCGTTAT | |
| | CAACTTGAAAAAGTGGCACCGAGTCGGTGCATG | |
| | ATCCTGACGACGGAGACCGCCGTCGTCGACAAG | |
| | CCCTGGCCATCAGC (SEQ ID NO: 652) | |
| 653 | GACTCTGCTGATGGCCAGACGGTTTTAGAGCTA | 3′ pegRNA, transcription |
| | GAAATAGCAAGTTAAAATAAGGCTAGTCCGTTA | adaptation (5′G, |
| | TCAACTTGAAAAAGTGGCACCGAGTCGGTGCAT | 3′TTTTTTT) |
| | GATCCTGACGACGGAGACCGCCGTCGTCGACAA | |
| | GCCCTGGCCATCAGCTTTTTTT (SEQ ID NO: 653) | |
| 654 | ACTCTGCTGATGGCCAGACGGTTTTAGAGCTAG | 3′ pegRNA |
| | AAATAGCAAGTTAAAATAAGGCTAGTCCGTTAT | |
| | CAACTTGAAAAAGTGGCACCGAGTCGGTGCATG | |
| | ATCCTGACGACGGAGACCGCCGTCGTCGACAAG | |
| | CCCTGGCCATCA (SEQ ID NO: 654) | |
| 655 | GACTCTGCTGATGGCCAGACGGTTTTAGAGCTA | 3′ pegRNA, transcription |
| | GAAATAGCAAGTTAAAATAAGGCTAGTCCGTTA | adaptation (5′G, |
| | TCAACTTGAAAAAGTGGCACCGAGTCGGTGCAT | 3′TTTTTTT) |
| | GATCCTGACGACGGAGACCGCCGTCGTCGACAA | |
| | GCCCTGGCCATCATTTTTTT (SEQ ID NO: 655) | |
| 656 | ACTCTGCTGATGGCCAGACGGTTTTAGAGCTAG | 3′ pegRNA |
| | AAATAGCAAGTTAAAATAAGGCTAGTCCGTTAT | |
| | CAACTTGAAAAAGTGGCACCGAGTCGGTGCAAA | |
| | GTCTCATTTGACTTACTGGCCATCA (SEQ ID NO: | |
| | 656) | |
| 657 | GACTCTGCTGATGGCCAGACGGTTTTAGAGCTA | 3′ pegRNA, transcription |
| | GAAATAGCAAGTTAAAATAAGGCTAGTCCGTTA | adaptation (5′G, |
| | TCAACTTGAAAAAGTGGCACCGAGTCGGTGCAA | 3′TTTTTTT) |
| | AGTCTCATTTGACTTACTGGCCATCATTTTTTT | |
| | (SEQ ID NO: 657) | |
| 658 | ACTCTGCTGATGGCCAGACGGTTTTAGAGCTAG | 3′ pegRNA |
| | AAATAGCAAGTTAAAATAAGGCTAGTCCGTTAT | |
| | CAACTTGAAAAAGTGGCACCGAGTCGGTGCAGG | |
| | CAGGATCTTGAAATTCTGGCCATCA (SEQ ID NO: | |
| | 658) | |
| 659 | GACTCTGCTGATGGCCAGACGGTTTTAGAGCTA | 3′ pegRNA, transcription |
| | GAAATAGCAAGTTAAAATAAGGCTAGTCCGTTA | adaptation (5′G, |
| | TCAACTTGAAAAAGTGGCACCGAGTCGGTGCAG | 3′TTTTTTT) |
| | GCAGGATCTTGAAATTCTGGCCATCATTTTTTT | |
| | (SEQ ID NO: 659) | |
| 660 | ACTCTGCTGATGGCCAGACGGTTTTAGAGCTAG | 3′ pegRNA |
| | AAATAGCAAGTTAAAATAAGGCTAGTCCGTTAT | |
| | CAACTTGAAAAAGTGGCACCGAGTCGGTGCGTA | |
| | CATGGCAGAGAGCAACTGGCCATCA (SEQ ID NO: | |
| | 660) | |
| 661 | GACTCTGCTGATGGCCAGACGGTTTTAGAGCTA | 3′ pegRNA, transcription |
| | GAAATAGCAAGTTAAAATAAGGCTAGTCCGTTA | adaptation (5′G, |
| | TCAACTTGAAAAAGTGGCACCGAGTCGGTGCGT | 3′TTTTTTT) |
| | ACATGGCAGAGAGCAACTGGCCATCATTTTTTT | |
| | (SEQ ID NO: 661) | |
| 662 | ACTCTGCTGATGGCCAGACGGTTTTAGAGCTAG | 3′ pegRNA |
| | AAATAGCAAGTTAAAATAAGGCTAGTCCGTTAT | |
| | CAACTTGAAAAAGTGGCACCGAGTCGGTGCAGA | |
| | ACGGCCAAAGGTCTGGCCATCA (SEQ ID NO: 662) | |
| 663 | GACTCTGCTGATGGCCAGACGGTTTTAGAGCTA | 3′ pegRNA, transcription |
| | GAAATAGCAAGTTAAAATAAGGCTAGTCCGTTA | adaptation (5′G, |
| | TCAACTTGAAAAAGTGGCACCGAGTCGGTGCAG | 3′TTTTTTT) |
| | AACGGCCAAAGGTCTGGCCATCATTTTTTT (SEQ | |
| | ID NO: 663) | |
| 664 | ACTCTGCTGATGGCCAGACGGTTTTAGAGCTAG | 3′ pegRNA |
| | AAATAGCAAGTTAAAATAAGGCTAGTCCGTTAT | |
| | CAACTTGAAAAAGTGGCACCGAGTCGGTGCACC | |
| | CAAGAGGAGGGCAGACTGGCCATCA (SEQ ID | |
| | NO: 664) | |
| 665 | GACTCTGCTGATGGCCAGACGGTTTTAGAGCTA | 3′ pegRNA, transcription |
| | GAAATAGCAAGTTAAAATAAGGCTAGTCCGTTA | adaptation (5′G, |
| | TCAACTTGAAAAAGTGGCACCGAGTCGGTGCAC | 3′TTTTTTT) |
| | CCAAGAGGAGGGCAGACTGGCCATCATTTTTTT | |
| | (SEQ ID NO: 665) | |
| 666 | ACTCTGCTGATGGCCAGACGGTTTTAGAGCTAG | 3′ pegRNA |
| | AAATAGCAAGTTAAAATAAGGCTAGTCCGTTAT | |
| | CAACTTGAAAAAGTGGCACCGAGTCGGTGCGGA | |
| | CGGCCCGTACATCTGGCCATCA (SEQ ID NO: 666) | |
| 667 | GACTCTGCTGATGGCCAGACGGTTTTAGAGCTA | 3′ pegRNA, transcription |
| | GAAATAGCAAGTTAAAATAAGGCTAGTCCGTTA | adaptation (5′G, |
| | TCAACTTGAAAAAGTGGCACCGAGTCGGTGCGG | 3′TTTTTTT) |
| | ACGGCCCGTACATCTGGCCATCATTTTTTT (SEQ | |
| | ID NO: 667) | |
| 668 | ACTCTGCTGATGGCCAGACGGTTTTAGAGCTAG | 3′ pegRNA |
| | AAATAGCAAGTTAAAATAAGGCTAGTCCGTTAT | |
| | CAACTTGAAAAAGTGGCACCGAGTCGGTGCAGG | |
| | CCTGGCGTCCAGGCCCTGGCCATCA (SEQ ID NO: | |
| | 668) | |
| 669 | GACTCTGCTGATGGCCAGACGGTTTTAGAGCTA | 3′ pegRNA, transcription |
| | GAAATAGCAAGTTAAAATAAGGCTAGTCCGTTA | adaptation (5′G, |
| | TCAACTTGAAAAAGTGGCACCGAGTCGGTGCAG | 3′TTTTTTT) |
| | GCCTGGCGTCCAGGCCCTGGCCATCATTTTTTT | |
| | (SEQ ID NO: 669) | |
| 670 | ACTCTGCTGATGGCCAGACGGTTTTAGAGCTAG | 3′ pegRNA |
| | AAATAGCAAGTTAAAATAAGGCTAGTCCGTTAT | |
| | CAACTTGAAAAAGTGGCACCGAGTCGGTGCAGC | |
| | CGCCGTGCGGCACTGGCCATCA (SEQ ID NO: 670) | |
| 671 | GACTCTGCTGATGGCCAGACGGTTTTAGAGCTA | 3′ pegRNA, transcription |
| | GAAATAGCAAGTTAAAATAAGGCTAGTCCGTTA | adaptation (5′G, |
| | TCAACTTGAAAAAGTGGCACCGAGTCGGTGCAG | 3′TTTTTTT) |
| | CCGCCGTGCGGCACTGGCCATCATTTTTTT (SEQ | |
| | ID NO: 671) | |
| 672 | ACTCTGCTGATGGCCAGACGGTTTTAGAGCTAG | 3′ pegRNA |
| | AAATAGCAAGTTAAAATAAGGCTAGTCCGTTAT | |
| | CAACTTGAAAAAGTGGCACCGAGTCGGTGCTCA | |
| | TACACAGAGCAAACTCCAACTGGCCATCA (SEQ | |
| | ID NO: 672) | |
| 673 | GACTCTGCTGATGGCCAGACGGTTTTAGAGCTA | 3′ pegRNA, transcription |
| | GAAATAGCAAGTTAAAATAAGGCTAGTCCGTTA | adaptation (5′G, |
| | TCAACTTGAAAAAGTGGCACCGAGTCGGTGCTC | 3′TTTTTTT) |
| | ATACACAGAGCAAACTCCAACTGGCCATCATTTT | |
| | TTT (SEQ ID NO: 673) | |
| 674 | ACTCTGCTGATGGCCAGACGGTTTTAGAGCTAG | 3′ pegRNA |
| | AAATAGCAAGTTAAAATAAGGCTAGTCCGTTAT | |
| | CAACTTGAAAAAGTGGCACCGAGTCGGTGCACA | |
| | GCACCATCTAGTGTAAACTGGCCATCA (SEQ ID | |
| | NO: 674) | |
| 675 | GACTCTGCTGATGGCCAGACGGTTTTAGAGCTA | 3′ pegRNA, transcription |
| | GAAATAGCAAGTTAAAATAAGGCTAGTCCGTTA | adaptation (5′G, |
| | TCAACTTGAAAAAGTGGCACCGAGTCGGTGCAC | 3′TTTTTTT) |
| | AGCACCATCTAGTGTAAACTGGCCATCATTTTTT | |
| | T (SEQ ID NO: 675) | |
| 676 | ACTCTGCTGATGGCCAGACGGTTTTAGAGCTAG | 3′ pegRNA |
| | AAATAGCAAGTTAAAATAAGGCTAGTCCGTTAT | |
| | CAACTTGAAAAAGTGGCACCGAGTCGGTGCCTC | |
| | GTCACTGGATGTGAAGTCTGGCCATCA (SEQ ID | |
| | NO: 676) | |
| 677 | GACTCTGCTGATGGCCAGACGGTTTTAGAGCTA | 3′ pegRNA, transcription |
| | GAAATAGCAAGTTAAAATAAGGCTAGTCCGTTA | adaptation (5′G, |
| | TCAACTTGAAAAAGTGGCACCGAGTCGGTGCCT | 3′TTTTTTT) |
| | CGTCACTGGATGTGAAGTCTGGCCATCATTTTTT | |
| | T (SEQ ID NO: 677) | |
| 678 | ACTCTGCTGATGGCCAGACGGTTTTAGAGCTAG | 3′ pegRNA |
| | AAATAGCAAGTTAAAATAAGGCTAGTCCGTTAT | |
| | CAACTTGAAAAAGTGGCACCGAGTCGGTGCTTG | |
| | ATGTCGTAGGTGATACCGCCTGGCCATCA (SEQ | |
| | ID NO: 678) | |
| 679 | GACTCTGCTGATGGCCAGACGGTTTTAGAGCTA | 3′ pegRNA, transcription |
| | GAAATAGCAAGTTAAAATAAGGCTAGTCCGTTA | adaptation (5′G, |
| | TCAACTTGAAAAAGTGGCACCGAGTCGGTGCTT | 3′TTTTTTT) |
| | GATGTCGTAGGTGATACCGCCTGGCCATCATTTT | |
| | TTT (SEQ ID NO: 679) | |
| 680 | ACTCTGCTGATGGCCAGACGGTTTTAGAGCTAG | 3′ pegRNA |
| | AAATAGCAAGTTAAAATAAGGCTAGTCCGTTAT | |
| | CAACTTGAAAAAGTGGCACCGAGTCGGTGCGGA | |
| | TCGTCCCTCAGGGGCAGCTGGCCATCA (SEQ ID | |
| | NO: 680) | |
| 681 | GACTCTGCTGATGGCCAGACGGTTTTAGAGCTA | 3′ pegRNA, transcription |
| | GAAATAGCAAGTTAAAATAAGGCTAGTCCGTTA | adaptation (5′G, |
| | TCAACTTGAAAAAGTGGCACCGAGTCGGTGCGG | 3′TTTTTTT) |
| | ATCGTCCCTCAGGGGCAGCTGGCCATCATTTTTT | |
| | T (SEQ ID NO: 681) | |
| 682 | ACTCTGCTGATGGCCAGACGGTTTTAGAGCTAG | 3′ pegRNA |
| | AAATAGCAAGTTAAAATAAGGCTAGTCCGTTAT | |
| | CAACTTGAAAAAGTGGCACCGAGTCGGTGCTCG | |
| | TGGTCTCGGGCATCAGACCCCTGGCCATCA (SEQ | |
| | ID NO: 682) | |
| 683 | GACTCTGCTGATGGCCAGACGGTTTTAGAGCTA | 3′ pegRNA, transcription |
| | GAAATAGCAAGTTAAAATAAGGCTAGTCCGTTA | adaptation (5′G, |
| | TCAACTTGAAAAAGTGGCACCGAGTCGGTGCTC | 3′TTTTTTT) |
| | GTGGTCTCGGGCATCAGACCCCTGGCCATCATTT | |
| | TTTT (SEQ ID NO: 683) | |
| 684 | ACTCTGCTGATGGCCAGACGGTTTTAGAGCTAG | 3′ pegRNA |
| | AAATAGCAAGTTAAAATAAGGCTAGTCCGTTAT | |
| | CAACTTGAAAAAGTGGCACCGAGTCGGTGCCCG | |
| | CACTCGGCCCGTGGGGCCTGGCCATCA (SEQ ID | |
| | NO: 684) | |
| 685 | GACTCTGCTGATGGCCAGACGGTTTTAGAGCTA | 3′ pegRNA, transcription |
| | GAAATAGCAAGTTAAAATAAGGCTAGTCCGTTA | adaptation (5′G, |
| | TCAACTTGAAAAAGTGGCACCGAGTCGGTGCCC | 3′TTTTTTT) |
| | GCACTCGGCCCGTGGGGCCTGGCCATCATTTTTT | |
| | T (SEQ ID NO: 685) | |
| 686 | ACTCTGCTGATGGCCAGACGGTTTTAGAGCTAG | 3′ pegRNA |
| | AAATAGCAAGTTAAAATAAGGCTAGTCCGTTAT | |
| | CAACTTGAAAAAGTGGCACCGAGTCGGTGCGAT | |
| | TTGATAATCTCGTATATAGAGCAGTTACTGGCCA | |
| | TCA (SEQ ID NO: 686) | |
| 687 | GACTCTGCTGATGGCCAGACGGTTTTAGAGCTA | 3′ pegRNA, transcription |
| | GAAATAGCAAGTTAAAATAAGGCTAGTCCGTTA | adaptation (5′G, |
| | TCAACTTGAAAAAGTGGCACCGAGTCGGTGCGA | 3′TTTTTTT) |
| | TTTGATAATCTCGTATATAGAGCAGTTACTGGCC | |
| | ATCATTTTTTT (SEQ ID NO: 687) | |
| 688 | ACTCTGCTGATGGCCAGACGGTTTTAGAGCTAG | 3′ pegRNA |
| | AAATAGCAAGTTAAAATAAGGCTAGTCCGTTAT | |
| | CAACTTGAAAAAGTGGCACCGAGTCGGTGCGTG | |
| | TCTCATGTTTCCTTGTATTACGTTACCCTGGCCAT | |
| | CA (SEQ ID NO: 688) | |
| 689 | GACTCTGCTGATGGCCAGACGGTTTTAGAGCTA | 3′ pegRNA, transcription |
| | GAAATAGCAAGTTAAAATAAGGCTAGTCCGTTA | adaptation (5′G, |
| | TCAACTTGAAAAAGTGGCACCGAGTCGGTGCGT | 3′TTTTTTT) |
| | GTCTCATGTTTCCTTGTATTACGTTACCCTGGCC | |
| | ATCATTTTTTT (SEQ ID NO: 689) | |
| 690 | ACTCTGCTGATGGCCAGACGGTTTTAGAGCTAG | 3′ pegRNA |
| | AAATAGCAAGTTAAAATAAGGCTAGTCCGTTAT | |
| | CAACTTGAAAAAGTGGCACCGAGTCGGTGCGTA | |
| | ATCCAAGCTCACTAGGGGCACAACTTGCTGGCC | |
| | ATCA (SEQ ID NO: 690) | |
| 691 | GACTCTGCTGATGGCCAGACGGTTTTAGAGCTA | 3′ pegRNA, transcription |
| | GAAATAGCAAGTTAAAATAAGGCTAGTCCGTTA | adaptation (5′G, |
| | TCAACTTGAAAAAGTGGCACCGAGTCGGTGCGT | 3′TTTTTTT) |
| | AATCCAAGCTCACTAGGGGCACAACTTGCTGGC | |
| | CATCATTTTTTT (SEQ ID NO: 691) | |
| 692 | ACTCTGCTGATGGCCAGACGGTTTTAGAGCTAG | 3′ pegRNA |
| | AAATAGCAAGTTAAAATAAGGCTAGTCCGTTAT | |
| | CAACTTGAAAAAGTGGCACCGAGTCGGTGCCTA | |
| | TCATGCATGGCGATCCCAGGTTCGCGCCTGGCCA | |
| | TCA (SEQ ID NO: 692) | |
| 693 | GACTCTGCTGATGGCCAGACGGTTTTAGAGCTA | 3′ pegRNA, transcription |
| | GAAATAGCAAGTTAAAATAAGGCTAGTCCGTTA | adaptation (5′G, |
| | TCAACTTGAAAAAGTGGCACCGAGTCGGTGCCT | 3′TTTTTTT) |
| | ATCATGCATGGCGATCCCAGGTTCGCGCCTGGCC | |
| | ATCATTTTTTT (SEQ ID NO: 693) | |
| 694 | ACTCTGCTGATGGCCAGACGGTTTTAGAGCTAG | 3′ pegRNA |
| | AAATAGCAAGTTAAAATAAGGCTAGTCCGTTAT | |
| | CAACTTGAAAAAGTGGCACCGAGTCGGTGCGGC | |
| | TTGTCGACGACGGCGGTCTCCGTCGTCAGGATCA | |
| | TCTGGCCATCA (SEQ ID NO: 694) | |
| 695 | GACTCTGCTGATGGCCAGACGGTTTTAGAGCTA | 3′ pegRNA, transcription |
| | GAAATAGCAAGTTAAAATAAGGCTAGTCCGTTA | adaptation (5′G, |
| | TCAACTTGAAAAAGTGGCACCGAGTCGGTGCGG | 3′TTTTTTT) |
| | CTTGTCGACGACGGCGGTCTCCGTCGTCAGGATC | |
| | ATCTGGCCATCATTTTTTT (SEQ ID NO: 695) | |
| 696 | ACTCTGCTGATGGCCAGACGGTTTTAGAGCTAG | 3′ pegRNA |
| | AAATAGCAAGTTAAAATAAGGCTAGTCCGTTAT | |
| | CAACTTGAAAAAGTGGCACCGAGTCGGTGCAAA | |
| | TATCTGACCCAGTTACGCTGGCCATCAG (SEQ ID | |
| | NO: 696) | |
| 697 | GACTCTGCTGATGGCCAGACGGTTTTAGAGCTA | 3′ pegRNA, transcription |
| | GAAATAGCAAGTTAAAATAAGGCTAGTCCGTTA | adaptation (5′G, |
| | TCAACTTGAAAAAGTGGCACCGAGTCGGTGCAA | 3′TTTTTTT) |
| | ATATCTGACCCAGTTACGCTGGCCATCAGTTTTT | |
| | TT (SEQ ID NO: 697) | |
| 698 | ACTCTGCTGATGGCCAGACGGTTTTAGAGCTAG | 3′ pegRNA |
| | AAATAGCAAGTTAAAATAAGGCTAGTCCGTTAT | |
| | CAACTTGAAAAAGTGGCACCGAGTCGGTGCAAA | |
| | TATCTGACCCAGTTACGCTGGCCATCAGCA (SEQ | |
| | ID NO: 698) | |
| 699 | GACTCTGCTGATGGCCAGACGGTTTTAGAGCTA | 3′ pegRNA, transcription |
| | GAAATAGCAAGTTAAAATAAGGCTAGTCCGTTA | adaptation (5′G, |
| | TCAACTTGAAAAAGTGGCACCGAGTCGGTGCAA | 3′TTTTTTT) |
| | ATATCTGACCCAGTTACGCTGGCCATCAGCATTT | |
| | TTTT (SEQ ID NO: 699) | |
| 700 | ACTCTGCTGATGGCCAGACGGTTTTAGAGCTAG | 3′ pegRNA |
| | AAATAGCAAGTTAAAATAAGGCTAGTCCGTTAT | |
| | CAACTTGAAAAAGTGGCACCGAGTCGGTGCCAA | |
| | AGAAATATCTGACCCAGTTACGCTGGCCATCAG | |
| | (SEQ ID NO: 700) | |
| 701 | GACTCTGCTGATGGCCAGACGGTTTTAGAGCTA | 3′ pegRNA, transcription |
| | GAAATAGCAAGTTAAAATAAGGCTAGTCCGTTA | adaptation (5′G, |
| | TCAACTTGAAAAAGTGGCACCGAGTCGGTGCCA | 3′TTTTTTT) |
| | AAGAAATATCTGACCCAGTTACGCTGGCCATCA | |
| | GTTTTTTT (SEQ ID NO: 701) | |
| 702 | ACTCTGCTGATGGCCAGACGGTTTTAGAGCTAG | 3′ pegRNA |
| | AAATAGCAAGTTAAAATAAGGCTAGTCCGTTAT | |
| | CAACTTGAAAAAGTGGCACCGAGTCGGTGCCAA | |
| | AGAAATATCTGACCCAGTTACGCTGGCCATCAG | |
| | CA (SEQ ID NO: 702) | |
| 703 | GACTCTGCTGATGGCCAGACGGTTTTAGAGCTA | 3′ pegRNA, transcription |
| | GAAATAGCAAGTTAAAATAAGGCTAGTCCGTTA | adaptation (5′G, |
| | TCAACTTGAAAAAGTGGCACCGAGTCGGTGCCA | 3′TTTTTTT) |
| | AAGAAATATCTGACCCAGTTACGCTGGCCATCA | |
| | GCATTTTTTT (SEQ ID NO: 703) | |
| 704 | ACTCTGCTGATGGCCAGACGGTTTTAGAGCTAG | 3′ pegRNA |
| | AAATAGCAAGTTAAAATAAGGCTAGTCCGTTAT | |
| | CAACTTGAAAAAGTGGCACCGAGTCGGTGCGGG | |
| | TACAAAGAAATATCTGACCCAGTTACGCTGGCC | |
| | ATCAG (SEQ ID NO: 704) | |
| 705 | GACTCTGCTGATGGCCAGACGGTTTTAGAGCTA | 3′ pegRNA, transcription |
| | GAAATAGCAAGTTAAAATAAGGCTAGTCCGTTA | adaptation (5′G, |
| | TCAACTTGAAAAAGTGGCACCGAGTCGGTGCGG | 3′TTTTTTT) |
| | GTACAAAGAAATATCTGACCCAGTTACGCTGGC | |
| | CATCAGTTTTTTT (SEQ ID NO: 705) | |
| 706 | ACTCTGCTGATGGCCAGACGGTTTTAGAGCTAG | 3′ pegRNA |
| | AAATAGCAAGTTAAAATAAGGCTAGTCCGTTAT | |
| | CAACTTGAAAAAGTGGCACCGAGTCGGTGCGGG | |
| | TACAAAGAAATATCTGACCCAGTTACGCTGGCC | |
| | ATCAGCA (SEQ ID NO: 706) | |
| 707 | GACTCTGCTGATGGCCAGACGGTTTTAGAGCTA | 3′ pegRNA, transcription |
| | GAAATAGCAAGTTAAAATAAGGCTAGTCCGTTA | adaptation (5′G, |
| | TCAACTTGAAAAAGTGGCACCGAGTCGGTGCGG | 3′TTTTTTT) |
| | GTACAAAGAAATATCTGACCCAGTTACGCTGGC | |
| | CATCAGCATTTTTTT (SEQ ID NO: 707) | |
| 708 | ACTCTGCTGATGGCCAGACGGTTTTAGAGCTAG | 3′ pegRNA |
| | AAATAGCAAGTTAAAATAAGGCTAGTCCGTTAT | |
| | CAACTTGAAAAAGTGGCACCGAGTCGGTGCATG | |
| | ATCCTGACGACGGAGACCGCCGTCGTCGACAAG | |
| | CCCTGGCCAT (SEQ ID NO: 708) | |
| 709 | GACTCTGCTGATGGCCAGACGGTTTTAGAGCTA | 3′ pegRNA, transcription |
| | GAAATAGCAAGTTAAAATAAGGCTAGTCCGTTA | adaptation (5′G, |
| | TCAACTTGAAAAAGTGGCACCGAGTCGGTGCAT | 3′TTTTTTT) |
| | GATCCTGACGACGGAGACCGCCGTCGTCGACAA | |
| | GCCCTGGCCATTTTTTTT (SEQ ID NO: 709) | |
| 710 | ACTCTGCTGATGGCCAGACGGTTTTAGAGCTAG | 3′ pegRNA |
| | AAATAGCAAGTTAAAATAAGGCTAGTCCGTTAT | |
| | CAACTTGAAAAAGTGGCACCGAGTCGGTGCATG | |
| | ATCCTGACGACGGAGACCGCCGTCGTCGACAAG | |
| | CCCTGGCCATC (SEQ ID NO: 710) | |
| 711 | GACTCTGCTGATGGCCAGACGGTTTTAGAGCTA | 3′ pegRNA, transcription |
| | GAAATAGCAAGTTAAAATAAGGCTAGTCCGTTA | adaptation (5′G, |
| | TCAACTTGAAAAAGTGGCACCGAGTCGGTGCAT | 3′TTTTTTT) |
| | GATCCTGACGACGGAGACCGCCGTCGTCGACAA | |
| | GCCCTGGCCATCTTTTTTT (SEQ ID NO: 711) | |
| 712 | ACTCTGCTGATGGCCAGACGGTTTTAGAGCTAG | 3′ pegRNA |
| | AAATAGCAAGTTAAAATAAGGCTAGTCCGTTAT | |
| | CAACTTGAAAAAGTGGCACCGAGTCGGTGCATG | |
| | ATCCTGACGACGGAGACCGCCGTCGTCGACAAG | |
| | CCCTGGCCATCAG (SEQ ID NO: 712) | |
| 713 | GACTCTGCTGATGGCCAGACGGTTTTAGAGCTA | 3′ pegRNA, transcription |
| | GAAATAGCAAGTTAAAATAAGGCTAGTCCGTTA | adaptation (5′G, |
| | TCAACTTGAAAAAGTGGCACCGAGTCGGTGCAT | 3′TTTTTTT) |
| | GATCCTGACGACGGAGACCGCCGTCGTCGACAA | |
| | GCCCTGGCCATCAGTTTTTTT (SEQ ID NO: 713) | |
| 714 | ACTCTGCTGATGGCCAGACGGTTTTAGAGCTAG | 3′ pegRNA |
| | AAATAGCAAGTTAAAATAAGGCTAGTCCGTTAT | |
| | CAACTTGAAAAAGTGGCACCGAGTCGGTGCATG | |
| | ATCCTGACGACGGAGACCGCCGTCGTCGACAAG | |
| | CCCTGGCCATCAGCA (SEQ ID NO: 714) | |
| 715 | GACTCTGCTGATGGCCAGACGGTTTTAGAGCTA | 3′ pegRNA, transcription |
| | GAAATAGCAAGTTAAAATAAGGCTAGTCCGTTA | adaptation (5′G, |
| | TCAACTTGAAAAAGTGGCACCGAGTCGGTGCAT | 3′TTTTTTT) |
| | GATCCTGACGACGGAGACCGCCGTCGTCGACAA | |
| | GCCCTGGCCATCAGCATTTTTTT (SEQ ID NO: 715) | |
| 716 | ACTCTGCTGATGGCCAGACGGTTTTAGAGCTAG | 3′ pegRNA |
| | AAATAGCAAGTTAAAATAAGGCTAGTCCGTTAT | |
| | CAACTTGAAAAAGTGGCACCGAGTCGGTGCATG | |
| | ATCCTGACGACGGAGACCGCCGTCGTCGACAAG | |
| | CCCTGGCCATCAGCAG (SEQ ID NO: 716) | |
| 717 | GACTCTGCTGATGGCCAGACGGTTTTAGAGCTA | 3′ pegRNA, transcription |
| | GAAATAGCAAGTTAAAATAAGGCTAGTCCGTTA | adaptation (5′G, |
| | TCAACTTGAAAAAGTGGCACCGAGTCGGTGCAT | 3′TTTTTTT) |
| | GATCCTGACGACGGAGACCGCCGTCGTCGACAA | |
| | GCCCTGGCCATCAGCAGTTTTTTT (SEQ ID NO: | |
| | 717) | |
| 718 | ACTCTGCTGATGGCCAGACGGTTTTAGAGCTAG | 3′ pegRNA |
| | AAATAGCAAGTTAAAATAAGGCTAGTCCGTTAT | |
| | CAACTTGAAAAAGTGGCACCGAGTCGGTGCATG | |
| | ATCCTGACGACGGAGACCGCCGTCGTCGACAAG | |
| | CCCTGGCCATCAGCAGA (SEQ ID NO: 718) | |
| 719 | GACTCTGCTGATGGCCAGACGGTTTTAGAGCTA | 3′ pegRNA, transcription |
| | GAAATAGCAAGTTAAAATAAGGCTAGTCCGTTA | adaptation (5′G, |
| | TCAACTTGAAAAAGTGGCACCGAGTCGGTGCAT | 3′TTTTTTT) |
| | GATCCTGACGACGGAGACCGCCGTCGTCGACAA | |
| | GCCCTGGCCATCAGCAGATTTTTTT (SEQ ID NO: | |
| | 719) | |
| 720 | ACTCTGCTGATGGCCAGACGGTTTTAGAGCTAG | 3′ pegRNA |
| | AAATAGCAAGTTAAAATAAGGCTAGTCCGTTAT | |
| | CAACTTGAAAAAGTGGCACCGAGTCGGTGCATG | |
| | ATCCTGACGACGGAGACCGCCGTCGTCGACAAG | |
| | CCCTGGCCATCAGCAGAG (SEQ ID NO: 720) | |
| 721 | GACTCTGCTGATGGCCAGACGGTTTTAGAGCTA | 3′ pegRNA, transcription |
| | GAAATAGCAAGTTAAAATAAGGCTAGTCCGTTA | adaptation (5′G, |
| | TCAACTTGAAAAAGTGGCACCGAGTCGGTGCAT | 3′TTTTTTT) |
| | GATCCTGACGACGGAGACCGCCGTCGTCGACAA | |
| | GCCCTGGCCATCAGCAGAGTTTTTTT (SEQ ID NO: | |
| | 721) | |
| 722 | ACTCTGCTGATGGCCAGACGGTTTTAGAGCTAG | 3′ pegRNA |
| | AAATAGCAAGTTAAAATAAGGCTAGTCCGTTAT | |
| | CAACTTGAAAAAGTGGCACCGAGTCGGTGCATG | |
| | ATCCTGACGACGGAGACCGCCGTCGTCGACAAG | |
| | CCCTGGCCATCAGCAGAGT (SEQ ID NO: 722) | |
| 723 | GACTCTGCTGATGGCCAGACGGTTTTAGAGCTA | 3′ pegRNA, transcription |
| | GAAATAGCAAGTTAAAATAAGGCTAGTCCGTTA | adaptation (5′G, |
| | TCAACTTGAAAAAGTGGCACCGAGTCGGTGCAT | 3′TTTTTTT) |
| | GATCCTGACGACGGAGACCGCCGTCGTCGACAA | |
| | GCCCTGGCCATCAGCAGAGTTTTTTTT (SEQ ID | |
| | NO: 723) | |
| 724 | ACTCTGCTGATGGCCAGACGGTTTAAGAGCGGG | 3′ pegRNA, gRNA core |
| | GAAATCCGCAAGTTTAAATAAGGCTAGTCCGTT | SEQ ID NO: 2259 |
| | ATCAGCGTGAAAACGCGGCACCGAGTCGGTGCA | |
| | TGATCCTGACGACGGAGACCGCCGTCGTCGACA | |
| | AGCCCTGGCCATCA (SEQ ID NO: 724) | |
| 725 | GACTCTGCTGATGGCCAGACGGTTTAAGAGCGG | 3′ pegRNA, transcription |
| | GGAAATCCGCAAGTTTAAATAAGGCTAGTCCGT | adaptation (5′G, |
| | TATCAGCGTGAAAACGCGGCACCGAGTCGGTGC | 3′TTTTTTT), gRNA core |
| | ATGATCCTGACGACGGAGACCGCCGTCGTCGAC | SEQ ID NO: 2259 |
| | AAGCCCTGGCCATCATTTTTTT (SEQ ID NO: 725) | |
| 726 | ACTCTGCTGATGGCCAGACGGTTTTAGAGCTAG | 3′ pegRNA, linker sequence |
| | AAATAGCAAGTTAAAATAAGGCTAGTCCGTTAT | number 2256, 3′ motif SEQ |
| | CAACTTGAAAAAGTGGCACCGAGTCGGTGCATG | ID NO: 2237 |
| | ATCCTGACGACGGAGACCGCCGTCGTCGACAAG | |
| | CCCTGGCCATCACTCACTCGCGGTTCTATCTAGT | |
| | TACGCGTTAAACCAACTAGAA (SEQ ID NO: 726) | |
| 727 | GACTCTGCTGATGGCCAGACGGTTTTAGAGCTA | 3′ pegRNA, linker sequence |
| | GAAATAGCAAGTTAAAATAAGGCTAGTCCGTTA | number 2256, 3′ motif SEQ |
| | TCAACTTGAAAAAGTGGCACCGAGTCGGTGCAT | ID NO: 2237, transcription |
| | GATCCTGACGACGGAGACCGCCGTCGTCGACAA | adaptation (5′G, |
| | GCCCTGGCCATCACTCACTCGCGGTTCTATCTAG | 3′TTTTTTT) |
| | TTACGCGTTAAACCAACTAGAATTTTTTT (SEQ ID | |
| | NO: 727) | |
| 728 | ACTCTGCTGATGGCCAGACGGTTTTAGAGCTAG | 3′ pegRNA, linker sequence |
| | AAATAGCAAGTTAAAATAAGGCTAGTCCGTTAT | number 2258, 3′ motif SEQ |
| | CAACTTGAAAAAGTGGCACCGAGTCGGTGCATG | ID NO: 2237 |
| | ATCCTGACGACGGAGACCGCCGTCGTCGACAAG | |
| | CCCTGGCCATCACTCACACGCGGTTCTATCTAGT | |
| | TACGCGTTAAACCAACTAGAA (SEQ ID NO: 728) | |
| 729 | GACTCTGCTGATGGCCAGACGGTTTTAGAGCTA | 3′ pegRNA, linker sequence |
| | GAAATAGCAAGTTAAAATAAGGCTAGTCCGTTA | number 2258, 3′ motif SEQ |
| | TCAACTTGAAAAAGTGGCACCGAGTCGGTGCAT | ID NO: 2237, transcription |
| | GATCCTGACGACGGAGACCGCCGTCGTCGACAA | adaptation (5′G, |
| | GCCCTGGCCATCACTCACACGCGGTTCTATCTAG | 3′TTTTTTT) |
| | TTACGCGTTAAACCAACTAGAATTTTTTT (SEQ ID | |
| | NO: 729) | |
| 730 | ACTCTGCTGATGGCCAGACGGTTTAAGAGCGGG | 3′ pegRNA, linker sequence |
| | GAAATCCGCAAGTTTAAATAAGGCTAGTCCGTT | number 2256,3′ motif SEQ |
| | ATCAGCGTGAAAACGCGGCACCGAGTCGGTGCA | ID NO: 2237, gRNA core |
| | TGATCCTGACGACGGAGACCGCCGTCGTCGACA | SEQ ID NO: 2259 |
| | AGCCCTGGCCATCACTCACTCGCGGTTCTATCTA | |
| | GTTACGCGTTAAACCAACTAGAA (SEQ ID NO: | |
| | 730) | |
| 731 | GACTCTGCTGATGGCCAGACGGTTTAAGAGCGG | 3′ pegRNA, linker sequence |
| | GGAAATCCGCAAGTTTAAATAAGGCTAGTCCGT | number 2256, 3′ motif SEQ |
| | TATCAGCGTGAAAACGCGGCACCGAGTCGGTGC | ID NO: 2237, transcription |
| | ATGATCCTGACGACGGAGACCGCCGTCGTCGAC | adaptation (5′G, |
| | AAGCCCTGGCCATCACTCACTCGCGGTTCTATCT | 3′TTTTTTT), gRNA core |
| | AGTTACGCGTTAAACCAACTAGAATTTTTTT | SEQ ID NO: 2259 |
| | (SEQ ID NO: 731) | |
| 732 | ACTCTGCTGATGGCCAGACGGTTTAAGAGCGGG | 3′ pegRNA, linker sequence |
| | GAAATCCGCAAGTTTAAATAAGGCTAGTCCGTT | number 2258, 3′ motif SEQ |
| | ATCAGCGTGAAAACGCGGCACCGAGTCGGTGCA | ID NO: 2237, gRNA core |
| | TGATCCTGACGACGGAGACCGCCGTCGTCGACA | SEQ ID NO: 2259 |
| | AGCCCTGGCCATCACTCACACGCGGTTCTATCTA | |
| | GTTACGCGTTAAACCAACTAGAA (SEQ ID NO: | |
| | 732) | |
| 733 | GACTCTGCTGATGGCCAGACGGTTTAAGAGCGG | 3′ pegRNA, linker sequence |
| | GGAAATCCGCAAGTTTAAATAAGGCTAGTCCGT | number 2256, 3′ motif SEQ |
| | TATCAGCGTGAAAACGCGGCACCGAGTCGGTGC | ID NO: 2237, transcription |
| | ATGATCCTGACGACGGAGACCGCCGTCGTCGAC | adaptation (5′G, |
| | AAGCCCTGGCCATCACTCACACGCGGTTCTATCT | 3′TTTTTTT), gRNA core |
| | AGTTACGCGTTAAACCAACTAGAATTTTTTT | SEQ ID NO: 2259 |
| | (SEQ ID NO: 733) | |
| 734 | ACTCTGCTGATGGCCAGACGGTATAAGAGCGGG | 3′ pegRNA, gRNA core |
| | GAAATCCGCAAGTTTATATAAGACTAGTTCGTTA | SEQ ID NO: 2267 |
| | TCAGCGTGAAAACGCGGCACCGAGTCGGTGCAT | |
| | GATCCTGACGACGGAGACCGCCGTCGTCGACAA | |
| | GCCCTGGCCATCA (SEQ ID NO: 734) | |
| 735 | GACTCTGCTGATGGCCAGACGGTATAAGAGCGG | 3′ pegRNA, transcription |
| | GGAAATCCGCAAGTTTATATAAGACTAGTTCGTT | adaptation (5′G, |
| | ATCAGCGTGAAAACGCGGCACCGAGTCGGTGCA | 3′TTTTTTT), gRNA core |
| | TGATCCTGACGACGGAGACCGCCGTCGTCGACA | SEQ ID NO: 2267 |
| | AGCCCTGGCCATCATTTTTTT (SEQ ID NO: 735) | |
| 736 | ACTCTGCTGATGGCCAGACGGTATAAGAGCGGG | 3′ pegRNA, gRNA core |
| | GAAATCCGCATGTTTATATAAGACTAGTTCGTTC | SEQ ID NO: 2268 |
| | TCAGCGTGAAAACGCGGCACCGAGTCGGTGCAT | |
| | GATCCTGACGACGGAGACCGCCGTCGTCGACAA | |
| | GCCCTGGCCATCA (SEQ ID NO: 736) | |
| 737 | GACTCTGCTGATGGCCAGACGGTATAAGAGCGG | 3′ pegRNA, transcription |
| | GGAAATCCGCATGTTTATATAAGACTAGTTCGTT | adaptation (5′G, |
| | CTCAGCGTGAAAACGCGGCACCGAGTCGGTGCA | 3′TTTTTTT), gRNA core |
| | TGATCCTGACGACGGAGACCGCCGTCGTCGACA | SEQ ID NO: 2268 |
| | AGCCCTGGCCATCATTTTTTT (SEQ ID NO: 737) | |
| 738 | ACTCTGCTGATGGCCAGACGGTTTTAGAGCTAG | 3′ pegRNA, transcription |
| | AAATAGCAAGTTAAAATAAGGCTAGTCCGTTAT | adaptation (3′TTTT) |
| | CAACTTGAAAAAGTGGCACCGAGTCGGTGCATG | |
| | ATCCTGACGACGGAGACCGCCGTCGTCGACAAG | |
| | CCCTGGCCATCAGCTTTT (SEQ ID NO: 738) | |
| 739 | ACTCTGCTGATGGCCAGACGGTTTTAGAGCTAG | 3′ pegRNA, transcription |
| | AAATAGCAAGTTAAAATAAGGCTAGTCCGTTAT | adaptation (3′TTTT) |
| | CAACTTGAAAAAGTGGCACCGAGTCGGTGCATG | |
| | ATCCTGACGACGGAGACCGCCGTCGTCGACAAG | |
| | CCCTGGCCATCATTTT (SEQ ID NO: 739) | |
| 2542 | ACTCTGCTGATGGCCAGACGGTTTTAGAGCTAG | 3′ pegRNA |
| | AAATAGCAAGTTAAAATAAGGCTAGTCCGTTAT | |
| | CAACTTGAAAAAGTGGCACCGAGTCGGTGCACA | |
| | CCCAGAGTCGTTGAAGGAGTCAGTAGGGGCGGC | |
| | AAATCTCAAAGAGTCTGGCCATC (SEQ ID NO: | |
| | 2542) | |
| 2543 | ACTCTGCTGATGGCCAGACGGTTTTAGAGCTAG | 3′ pegRNA |
| | AAATAGCAAGTTAAAATAAGGCTAGTCCGTTAT | |
| | CAACTTGAAAAAGTGGCACCGAGTCGGTGCAGA | |
| | GTCGTTGAAGGAGTCAGTAGGGGCGGCAAATCT | |
| | CAAAGAGTCTGGCCATC (SEQ ID NO: 2543) | |
| 2544 | ACTCTGCTGATGGCCAGACGGTTTTAGAGCTAG | 3′ pegRNA |
| | AAATAGCAAGTTAAAATAAGGCTAGTCCGTTAT | |
| | CAACTTGAAAAAGTGGCACCGAGTCGGTGCGTT | |
| | GAAGGAGTCAGTAGGGGCGGCAAATCTCAAAGA | |
| | GTCTGGCCATC (SEQ ID NO: 2544) | |
| 2545 | ACTCTGCTGATGGCCAGACGGTTTTAGAGCTAG | 3′ pegRNA |
| | AAATAGCAAGTTAAAATAAGGCTAGTCCGTTAT | |
| | CAACTTGAAAAAGTGGCACCGAGTCGGTGCAGG | |
| | AGTCAGTAGGGGCGGCAAATCTCAAAGAGTCTG | |
| | GCCATC (SEQ ID NO: 2545) | |
| 2546 | ACTCTGCTGATGGCCAGACGGTTTTAGAGCTAG | 3′ pegRNA |
| | AAATAGCAAGTTAAAATAAGGCTAGTCCGTTAT | |
| | CAACTTGAAAAAGTGGCACCGAGTCGGTGCACA | |
| | CCCAGAGTCGTTGAAGGAGTCAGTAGGGGCGGC | |
| | AAATCTCAAAGAGTCTGGCCATCAG (SEQ ID NO: | |
| | 2546) | |
| 2547 | ACTCTGCTGATGGCCAGACGGTTTTAGAGCTAG | 3′ pegRNA |
| | AAATAGCAAGTTAAAATAAGGCTAGTCCGTTAT | |
| | CAACTTGAAAAAGTGGCACCGAGTCGGTGCAGA | |
| | GTCGTTGAAGGAGTCAGTAGGGGCGGCAAATCT | |
| | CAAAGAGTCTGGCCATCAG (SEQ ID NO: 2547) | |
| 2548 | ACTCTGCTGATGGCCAGACGGTTTTAGAGCTAG | 3′ pegRNA |
| | AAATAGCAAGTTAAAATAAGGCTAGTCCGTTAT | |
| | CAACTTGAAAAAGTGGCACCGAGTCGGTGCAGG | |
| | AGTCAGTAGGGGCGGCAAATCTCAAAGAGTCTG | |
| | GCCATCAG (SEQ ID NO: 2548) | |

TABLE 15
Exemplary 3′ PEgRNA and component sequence

| Sequence | | |
|---|---|---|
| number | Sequence | Description |
| 740 | CCCAGTGTCCACCTCCT | 3′ Spacer |
| | GGG | |
| | (SEQ ID NO: 740) | |
| 741 | AGTGTCCACCTCCTGGG | 3′ Spacer |
| | (SEQ ID NO: 741) | |
| 742 | CAGTGTCCACCTCCTGG | 3′ Spacer |
| | G | |
| | (SEQ ID NO: 742) | |
| 743 | CCAGTGTCCACCTCCTG | 3′ Spacer |
| | GG | |
| | (SEQ ID NO: 743) | |
| 744 | ACCCAGTGTCCACCTCC | 3′ Spacer |
| | TGGG | |
| | (SEQ ID NO: 744) | |
| 745 | AACCCAGTGTCCACCTC | 3′ Spacer |
| | CTGGG | |
| | (SEQ ID NO: 745) | |
| 746 | AGGAG | 3′ PBS |
| 747 | AGGAGG | 3′ PBS |
| 748 | AGGAGGT | 3′ PBS |
| 749 | AGGAGGTG | 3′ PBS |
| 750 | AGGAGGTGG | 3′ PBS |
| 751 | AGGAGGTGGA | 3′ PBS |
| | (SEQ ID NO: 751) | |
| 752 | AGGAGGTGGAC | 3′ PBS |
| | (SEQ ID NO: 752) | |
| 753 | AGGAGGTGGACA | 3′ PBS |
| | (SEQ ID NO: 753) | |
| 754 | AGGAGGTGGACAC | 3′ PBS |
| | (SEQ ID NO: 754) | |
| 755 | AGGAGGTGGACACT | 3′ PBS |
| | (SEQ ID NO: 755) | |
| 756 | AGGAGGTGGACACTG | 3′ PBS |
| | (SEQ ID NO: 756) | |
| 757 | AGGAGGTGGACACTGG | 3′ PBS |
| | (SEQ ID NO: 757) | |
| 758 | AGGAGGTGGACACTGGG | 3′ PBS |
| | (SEQ ID NO: 758) | |
| 759 | AGGAGGTGGACACTGGG | 3′ PBS |
| | T | |
| | (SEQ ID NO: 759) | |
| 760 | AGGAGGTGGACACTGGG | 3′ PBS |
| | TT | |
| | (SEQ ID NO: 760) | |
| 761 | CCCAGTGTCCACCTCCT | 3′ pegRNA |
| | GGGGTTTTAGAGCTAGA | |
| | AATAGCAAGTTAAAATA | |
| | AGGCTAGTCCGTTATCA | |
| | ACTTGAAAAAGTGGCAC | |
| | CGAGTCGGTGCATGATC | |
| | CTGACGACGGAGACCGC | |
| | CGTCGTCGACAAGCCAG | |
| | GAGGTGGACA | |
| | (SEQ ID NO: 761) | |
| 762 | GCCCAGTGTCCACCTCC | 3′ pegRNA, |
| | TGGGGTTTTAGAGCTAG | trans- |
| | AAATAGCAAGTTAAAAT | cription |
| | AAGGCTAGTCCGTTATC | adaptation |
| | AACTTGAAAAAGTGGCA | (5′G, 3′ |
| | CCGAGTCGGTGCATGAT | TTTTTTT) |
| | CCTGACGACGGAGACCG | |
| | CCGTCGTCGACAAGCCA | |
| | GGAGGTGGACATTTTTT | |
| | T | |
| | (SEQ ID NO: 762) | |
| 763 | CCCAGTGTCCACCTCCT | 3′ pegRNA |
| | GGGGTTTTAGAGCTAGA | |
| | AATAGCAAGTTAAAATA | |
| | AGGCTAGTCCGTTATCA | |
| | ACTTGAAAAAGTGGCAC | |
| | CGAGTCGGTGCATGATC | |
| | CTGACGACGGAGACCGC | |
| | CGTCGTCGACAAGCCAG | |
| | GAGGTGGA | |
| | (SEQ ID NO: 763) | |
| 764 | GCCCAGTGTCCACCTCC | 3′ pegRNA, |
| | TGGGGTTTTAGAGCTAG | trans- |
| | AAATAGCAAGTTAAAAT | cription |
| | AAGGCTAGTCCGTTATC | adaptation |
| | AACTTGAAAAAGTGGCA | (5′G, 3′ |
| | CCGAGTCGGTGCATGAT | TTTTTTT) |
| | CCTGACGACGGAGACCG | |
| | CCGTCGTCGACAAGCCA | |
| | GGAGGTGGATTTTTTT | |
| | (SEQ ID NO: 764) | |
| 765 | CCCAGTGTCCACCTCCT | 3′ pegRNA, |
| | GGGGTTTTAGAGCTAGA | trans- |
| | AATAGCAAGTTAAAATA | cription |
| | AGGCTAGTCCGTTATCA | adaptation |
| | ACTTGAAAAAGTGGCAC | (3′TTTT) |
| | CGAGTCGGTGCATGATC | |
| | CTGACGACGGAGACCGC | |
| | CGTCGTCGACAAGCCAG | |
| | GAGGTGGACATTTT | |
| | (SEQ ID NO: 765) | |
| 766 | CCCAGTGTCCACCTCCT | 3′ pegRNA, |
| | GGGGTTTTAGAGCTAGA | trans- |
| | AATAGCAAGTTAAAATA | cription |
| | AGGCTAGTCCGTTATCA | adaptation |
| | ACTTGAAAAAGTGGCAC | (3′TTTT) |
| | CGAGTCGGTGCATGATC | |
| | CTGACGACGGAGACCGC | |
| | CGTCGTCGACAAGCCAG | |
| | GAGGTGGATTTT | |
| | (SEQ ID NO: 766) | |

TABLE 16
Exemplary 3′ PEgRNA and component sequence

| Sequence | | |
|---|---|---|
| number | Sequence | Description |
| 767 | GATGAATTTTGGAGACC | 3′ Spacer |
| | AGG | |
| | (SEQ ID NO: 767) | |
| 768 | GAATTTTGGAGACCAGG | 3′ Spacer |
| | (SEQ ID NO: 768) | |
| 769 | TGAATTTTGGAGACCAG | 3′ Spacer |
| | G | |
| | (SEQ ID NO: 769) | |
| 770 | ATGAATTTTGGAGACCA | 3′ Spacer |
| | GG | |
| | (SEQ ID NO: 770) | |
| 771 | TGATGAATTTTGGAGAC | 3′ Spacer |
| | CAGG | |
| | (SEQ ID NO: 771) | |
| 772 | CTGATGAATTTTGGAGA | 3′ Spacer |
| | CCAGG | |
| | (SEQ ID NO: 772) | |
| 773 | GGTCT | 3′ PBS |
| 774 | GGTCTC | 3′ PBS |
| 775 | GGTCTCC | 3′ PBS |
| 776 | GGTCTCCA | 3′ PBS |
| 777 | GGTCTCCAA | 3′ PBS |
| 778 | GGTCTCCAAA | 3′ PBS |
| | (SEQ ID NO: 778) | |
| 779 | GGTCTCCAAAA | 3′ PBS |
| | (SEQ ID NO: 779) | |
| 780 | GGTCTCCAAAAT | 3′ PBS |
| | (SEQ ID NO: 780) | |
| 781 | GGTCTCCAAAATT | 3′ PBS |
| | (SEQ ID NO: 781) | |
| 782 | GGTCTCCAAAATTC | 3′ PBS |
| | (SEQ ID NO: 782) | |
| 783 | GGTCTCCAAAATTCA | 3′ PBS |
| | (SEQ ID NO: 783) | |
| 784 | GGTCTCCAAAATTCAT | 3′ PBS |
| | (SEQ ID NO: 784) | |
| 785 | GGTCTCCAAAATTCATC | 3′ PBS |
| | (SEQ ID NO: 785) | |
| 786 | GGTCTCCAAAATTCATC | 3′ PBS |
| | A | |
| | (SEQ ID NO: 786) | |
| 787 | GGTCTCCAAAATTCATC | 3′ PBS |
| | AG | |
| | (SEQ ID NO: 787) | |
| 788 | GATGAATTTTGGAGACC | 3′ pegRNA |
| | AGGGTTTTAGAGCTAGA | |
| | AATAGCAAGTTAAAATA | |
| | AGGCTAGTCCGTTATCA | |
| | ACTTGAAAAAGTGGCAC | |
| | CGAGTCGGTGCATGATC | |
| | CTGACGACGGAGACCGC | |
| | CGTCGTCGACAAGCCGG | |
| | TCTCCAAAAT | |
| | (SEQ ID NO: 788) | |
| 789 | GATGAATTTTGGAGACC | 3′ pegRNA, |
| | AGGGTTTTAGAGCTAGA | trans- |
| | AATAGCAAGTTAAAATA | cription |
| | AGGCTAGTCCGTTATCA | adaptation |
| | ACTTGAAAAAGTGGCAC | (3′TTTTTTT, |
| | CGAGTCGGTGCATGATC | 3′A) |
| | CTGACGACGGAGACCGC | |
| | CGTCGTCGACAAGCCGG | |
| | TCTCCAAAATATTTTTT | |
| | T | |
| | (SEQ ID NO: 789) | |
| 790 | GATGAATTTTGGAGACC | 3′ pegRNA |
| | AGGGTTTTAGAGCTAGA | |
| | AATAGCAAGTTAAAATA | |
| | AGGCTAGTCCGTTATCA | |
| | ACTTGAAAAAGTGGCAC | |
| | CGAGTCGGTGCATGATC | |
| | CTGACGACGGAGACCGC | |
| | CGTCGTCGACAAGCCGG | |
| | TCTCCAAA | |
| | (SEQ ID NO: 790) | |
| 791 | GATGAATTTTGGAGACC | 3′ pegRNA, |
| | AGGGTTTTAGAGCTAGA | trans- |
| | AATAGCAAGTTAAAATA | cription |
| | AGGCTAGTCCGTTATCA | adaptation |
| | ACTTGAAAAAGTGGCAC | (3′TTTTTTT) |
| | CGAGTCGGTGCATGATC | |
| | CTGACGACGGAGACCGC | |
| | CGTCGTCGACAAGCCGG | |
| | TCTCCAAATTTTTTT | |
| | (SEQ ID NO: 791) | |
| 793 | GATGAATTTTGGAGACC | 3′ pegRNA, |
| | AGGGTTTTAGAGCTAGA | trans- |
| | AATAGCAAGTTAAAATA | cription |
| | AGGCTAGTCCGTTATCA | adaptation |
| | ACTTGAAAAAGTGGCAC | (3′TTTT) |
| | CGAGTCGGTGCATGATC | |
| | CTGACGACGGAGACCGC | |
| | CGTCGTCGACAAGCCGG | |
| | TCTCCAAAATATTTT | |
| | (SEQ ID NO: 793) | |
| 794 | GATGAATTTTGGAGACC | 3′ pegRNA |
| | AGGGTTTTAGAGCTAGA | |
| | AATAGCAAGTTAAAATA | |
| | AGGCTAGTCCGTTATCA | |
| | ACTTGAAAAAGTGGCAC | |
| | CGAGTCGGTGCATGATC | |
| | CTGACGACGGAGACCGC | |
| | CGTCGTCGACAAGCCGG | |
| | TCTCCAAAATA | |
| | (SEQ ID NO: 794) | |
| 795 | GATGAATTTTGGAGACC | 3′ pegRNA, |
| | AGGGTTTTAGAGCTAGA | trans- |
| | AATAGCAAGTTAAAATA | cription |
| | AGGCTAGTCCGTTATCA | adaptation |
| | ACTTGAAAAAGTGGCAC | (3′TTTT) |
| | CGAGTCGGTGCATGATC | |
| | CTGACGACGGAGACCGC | |
| | CGTCGTCGACAAGCCGG | |
| | TCTCCAAATTTT | |
| | (SEQ ID NO: 795) | |

TABLE 17
Exemplary 3′ PEgRNA and component sequence

| Sequence | | |
|---|---|---|
| number | Sequence | Description |
| 796 | GCTAGTTTTTAGTAGAG | 3′ Spacer |
| | ATG | |
| | (SEQ ID NO: 796) | |
| 797 | AGTTTTTAGTAGAGATG | 3′ Spacer |
| | (SEQ ID NO: 797) | |
| 798 | TAGTTTTTAGTAGAGAT | 3′ Spacer |
| | G | |
| | (SEQ ID NO: 798) | |
| 799 | CTAGTTTTTAGTAGAGA | 3′ Spacer |
| | TG | |
| | (SEQ ID NO: 799) | |
| 800 | AGCTAGTTTTTAGTAGA | 3′ Spacer |
| | GATG | |
| | (SEQ ID NO: 800) | |
| 801 | GAGCTAGTTTTTAGTAG | 3′ Spacer |
| | AGATG | |
| | (SEQ ID NO: 801) | |
| 802 | CTCTA | 3′ PBS |
| 803 | CTCTAC | 3′ PBS |
| 804 | CTCTACT | 3′ PBS |
| 805 | CTCTACTA | 3′ PBS |
| 806 | CTCTACTAA | 3′ PBS |
| 807 | CTCTACTAAA | 3′ PBS |
| | (SEQ ID NO: 807) | |
| 808 | CTCTACTAAAA | 3′ PBS |
| | (SEQ ID NO: 808) | |
| 809 | CTCTACTAAAAA | 3′ PBS |
| | (SEQ ID NO: 809) | |
| 810 | CTCTACTAAAAAC | 3′ PBS |
| | (SEQ ID NO: 810) | |
| 811 | CTCTACTAAAAACT | 3′ PBS |
| | (SEQ ID NO: 811) | |
| 812 | CTCTACTAAAAACTA | 3′ PBS |
| | (SEQ ID NO: 812) | |
| 813 | CTCTACTAAAAACTAG | 3′ PBS |
| | (SEQ ID NO: 813) | |
| 814 | CTCTACTAAAAACTAGC | 3′ PBS |
| | (SEQ ID NO: 814) | |
| 815 | CTCTACTAAAAACTAGC | 3′ PBS |
| | T | |
| | (SEQ ID NO: 815) | |
| 816 | CTCTACTAAAAACTAGC | 3′ PBS |
| | TC | |
| | (SEQ ID NO: 816) | |
| 817 | GCTAGTTTTTAGTAGAG | 3′ pegRNA |
| | ATGGTTTTAGAGCTAGA | |
| | AATAGCAAGTTAAAATA | |
| | AGGCTAGTCCGTTATCA | |
| | ACTTGAAAAAGTGGCAC | |
| | CGAGTCGGTGCATGATC | |
| | CTGACGACGGAGACCGC | |
| | CGTCGTCGACAAGCCCT | |
| | CTACTAAAAA | |
| | (SEQ ID NO: 817) | |
| 818 | GCTAGTTTTTAGTAGAG | 3′ pegRNA, |
| | ATGGTTTTAGAGCTAGA | trans- |
| | AATAGCAAGTTAAAATA | cription |
| | AGGCTAGTCCGTTATCA | adaptation |
| | ACTTGAAAAAGTGGCAC | (3′TTTTTTT) |
| | CGAGTCGGTGCATGATC | |
| | CTGACGACGGAGACCGC | |
| | CGTCGTCGACAAGCCCT | |
| | CTACTAAAAATTTTTTT | |
| | (SEQ ID NO: 818) | |
| 819 | GCTAGTTTTTAGTAGAG | 3′ pegRNA |
| | ATGGTTTTAGAGCTAGA | |
| | AATAGCAAGTTAAAATA | |
| | AGGCTAGTCCGTTATCA | |
| | ACTTGAAAAAGTGGCAC | |
| | CGAGTCGGTGCATGATC | |
| | CTGACGACGGAGACCGC | |
| | CGTCGTCGACAAGCCCT | |
| | CTACTAAA | |
| | (SEQ ID NO: 819) | |
| 820 | GCTAGTTTTTAGTAGAG | 3′ pegRNA, |
| | ATGGTTTTAGAGCTAGA | trans- |
| | AATAGCAAGTTAAAATA | cription |
| | AGGCTAGTCCGTTATCA | adaptation |
| | ACTTGAAAAAGTGGCAC | (3′TTTTTTT) |
| | CGAGTCGGTGCATGATC | |
| | CTGACGACGGAGACCGC | |
| | CGTCGTCGACAAGCCCT | |
| | CTACTAAATTTTTTT | |
| | (SEQ ID NO: 820) | |
| 821 | GCTAGTTTTTAGTAGAG | 3′ pegRNA, |
| | ATGGTTTTAGAGCTAGA | trans- |
| | AATAGCAAGTTAAAATA | cription |
| | AGGCTAGTCCGTTATCA | adaptation |
| | ACTTGAAAAAGTGGCAC | (3′TTTT) |
| | CGAGTCGGTGCATGATC | |
| | CTGACGACGGAGACCGC | |
| | CGTCGTCGACAAGCCCT | |
| | CTACTAAAAATTTT | |
| | (SEQ ID NO: 821) | |
| 822 | GCTAGTTTTTAGTAGAG | 3′ pegRNA, |
| | ATGGTTTTAGAGCTAGA | trans- |
| | AATAGCAAGTTAAAATA | cription |
| | AGGCTAGTCCGTTATCA | adaptation |
| | ACTTGAAAAAGTGGCAC | (3′TTTT) |
| | CGAGTCGGTGCATGATC | |
| | CTGACGACGGAGACCGC | |
| | CGTCGTCGACAAGCCCT | |
| | CTACTAAATTTT | |
| | (SEQ ID NO: 822) | |

TABLE 18
Exemplary 3′ PEgRNA and component sequence

| Sequence | | |
|---|---|---|
| number | Sequence | Description |
| 823 | TGAGCAACCACACCCAG | 3′ Spacer |
| | CCT | |
| | (SEQ ID NO: 823) | |
| 824 | GCAACCACACCCAGCCT | 3′ Spacer |
| | (SEQ ID NO: 824) | |
| 825 | AGCAACCACACCCAGCC | 3′ Spacer |
| | T | |
| | (SEQ ID NO: 825) | |
| 826 | GAGCAACCACACCCAGC | 3′ Spacer |
| | CT | |
| | (SEQ ID NO: 826) | |
| 827 | GTGAGCAACCACACCCA | 3′ Spacer |
| | GCCT | |
| | (SEQ ID NO: 827) | |
| 828 | TGTGAGCAACCACACCC | 3′ Spacer |
| | AGCCT | |
| | (SEQ ID NO: 828) | |
| 829 | CTGGG | 3′ PBS |
| 830 | CTGGGT | 3′ PBS |
| 831 | CTGGGTG | 3′ PBS |
| 832 | CTGGGTGT | 3′ PBS |
| 833 | CTGGGTGTG | 3′ PBS |
| 834 | CTGGGTGTGG | 3′ PBS |
| | (SEQ ID NO: 834) | |
| 835 | CTGGGTGTGGT | 3′ PBS |
| | (SEQ ID NO: 835) | |
| 836 | CTGGGTGTGGTT | 3′ PBS |
| | (SEQ ID NO: 836) | |
| 837 | CTGGGTGTGGTTG | 3′ PBS |
| | (SEQ ID NO: 837) | |
| 838 | CTGGGTGTGGTTGC | 3′ PBS |
| | (SEQ ID NO: 838) | |
| 839 | CTGGGTGTGGTTGCT | 3′ PBS |
| | (SEQ ID NO: 839) | |
| 840 | CTGGGTGTGGTTGCTC | 3′ PBS |
| | (SEQ ID NO: 840) | |
| 841 | CTGGGTGTGGTTGCTCA | 3′ PBS |
| | (SEQ ID NO: 841) | |
| 842 | CTGGGTGTGGTTGCTCA | 3′ PBS |
| | C | |
| | (SEQ ID NO: 842) | |
| 843 | CTGGGTGTGGTTGCTCA | 3′ PBS |
| | CA | |
| | (SEQ ID NO: 843) | |
| 844 | TGAGCAACCACACCCAG | 3′ pegRNA |
| | CCTGTTTTAGAGCTAGA | |
| | AATAGCAAGTTAAAATA | |
| | AGGCTAGTCCGTTATCA | |
| | ACTTGAAAAAGTGGCAC | |
| | CGAGTCGGTGCATGATC | |
| | CTGACGACGGAGACCGC | |
| | CGTCGTCGACAAGCCCT | |
| | GGGTGTGGTT | |
| | (SEQ ID NO: 844) | |
| 845 | GTGAGCAACCACACCCA | 3′ pegRNA, |
| | GCCTGTTTTAGAGCTAG | trans- |
| | AAATAGCAAGTTAAAAT | cription |
| | AAGGCTAGTCCGTTATC | adaptation |
| | AACTTGAAAAAGTGGCA | (5′G, 3′ |
| | CCGAGTCGGTGCATGAT | TTTTTTT) |
| | CCTGACGACGGAGACCG | |
| | CCGTCGTCGACAAGCCC | |
| | TGGGTGTGGTTTTTTTT | |
| | T | |
| | (SEQ ID NO: 845) | |
| 846 | TGAGCAACCACACCCAG | 3′ pegRNA |
| | CCTGTTTTAGAGCTAGA | |
| | AATAGCAAGTTAAAATA | |
| | AGGCTAGTCCGTTATCA | |
| | ACTTGAAAAAGTGGCAC | |
| | CGAGTCGGTGCATGATC | |
| | CTGACGACGGAGACCGC | |
| | CGTCGTCGACAAGCCCT | |
| | GGGTGTGG | |
| | (SEQ ID NO: 846) | |
| 847 | GTGAGCAACCACACCCA | 3′ pegRNA, |
| | GCCTGTTTTAGAGCTAG | trans- |
| | AAATAGCAAGTTAAAAT | cription |
| | AAGGCTAGTCCGTTATC | adaptation |
| | AACTTGAAAAAGTGGCA | (5′G, 3′ |
| | CCGAGTCGGTGCATGAT | TTTTTTT, |
| | CCTGACGACGGAGACCG | 3′A) |
| | CCGTCGTCGACAAGCCC | |
| | TGGGTGTGGATTTTTTT | |
| | (SEQ ID NO: 847) | |
| 849 | TGAGCAACCACACCCAG | 3′ pegRNA, |
| | CCTGTTTTAGAGCTAGA | trans- |
| | AATAGCAAGTTAAAATA | cription |
| | AGGCTAGTCCGTTATCA | adaptation |
| | ACTTGAAAAAGTGGCAC | (3′TTTT) |
| | CGAGTCGGTGCATGATC | |
| | CTGACGACGGAGACCGC | |
| | CGTCGTCGACAAGCCCT | |
| | GGGTGTGGTTTTTT | |
| | (SEQ ID NO: 849) | |
| 850 | TGAGCAACCACACCCAG | 3′ pegRNA, |
| | CCTGTTTTAGAGCTAGA | trans- |
| | AATAGCAAGTTAAAATA | cription |
| | AGGCTAGTCCGTTATCA | adaptation |
| | ACTTGAAAAAGTGGCAC | (3′TTTT) |
| | CGAGTCGGTGCATGATC | |
| | CTGACGACGGAGACCGC | |
| | CGTCGTCGACAAGCCCT | |
| | GGGTGTGGATTTT | |
| | (SEQ ID NO: 850) | |
| 851 | TGAGCAACCACACCCAG | 3′ pegRNA |
| | CCTGTTTTAGAGCTAGA | |
| | AATAGCAAGTTAAAATA | |
| | AGGCTAGTCCGTTATCA | |
| | ACTTGAAAAAGTGGCAC | |
| | CGAGTCGGTGCATGATC | |
| | CTGACGACGGAGACCGC | |
| | CGTCGTCGACAAGCCCT | |
| | GGGTGTGGA | |
| | (SEQ ID NO: 851) | |

TABLE 19
Exemplary 3′ PEgRNA and component sequence

| Sequence | | |
|---|---|---|
| number | Sequence | Description |
| 852 | ACTAAATATGCTGTCCC | 3′ Spacer |
| | ATG | |
| | (SEQ ID NO: 852) | |
| 853 | AAATATGCTGTCCCATG | 3′ Spacer |
| | (SEQ ID NO: 853) | |
| 854 | TAAATATGCTGTCCCAT | 3′ Spacer |
| | G | |
| | (SEQ ID NO: 854) | |
| 855 | CTAAATATGCTGTCCCA | 3′ Spacer |
| | TG | |
| | (SEQ ID NO: 855) | |
| 856 | TACTAAATATGCTGTCC | 3′ Spacer |
| | CATG | |
| | (SEQ ID NO: 856) | |
| 857 | GTACTAAATATGCTGTC | 3′ Spacer |
| | CCATG | |
| | (SEQ ID NO: 857) | |
| 858 | GGGAC | 3′ PBS |
| 859 | GGGACA | 3′ PBS |
| 860 | GGGACAG | 3′ PBS |
| 861 | GGGACAGC | 3′ PBS |
| 862 | GGGACAGCA | 3′ PBS |
| 863 | GGGACAGCAT | 3′ PBS |
| | (SEQ ID NO: 863) | |
| 864 | GGGACAGCATA | 3′ PBS |
| | (SEQ ID NO: 864) | |
| 865 | GGGACAGCATAT | 3′ PBS |
| | (SEQ ID NO: 865) | |
| 866 | GGGACAGCATATT | 3′ PBS |
| | (SEQ ID NO: 866) | |
| 867 | GGGACAGCATATTT | 3′ PBS |
| | (SEQ ID NO: 867) | |
| 868 | GGGACAGCATATTTA | 3′ PBS |
| | (SEQ ID NO: 868) | |
| 869 | GGGACAGCATATTTAG | 3′ PBS |
| | (SEQ ID NO: 869) | |
| 870 | GGGACAGCATATTTAGT | 3′ PBS |
| | (SEQ ID NO: 870) | |
| 871 | GGGACAGCATATTTAGT | 3′ PBS |
| | A | |
| | (SEQ ID NO: 871) | |
| 872 | GGGACAGCATATTTAGT | 3′ PBS |
| | AC | |
| | (SEQ ID NO: 872) | |
| 873 | ACTAAATATGCTGTCCC | 3′ pegRNA |
| | ATGGTTTTAGAGCTAGA | |
| | AATAGCAAGTTAAAATA | |
| | AGGCTAGTCCGTTATCA | |
| | ACTTGAAAAAGTGGCAC | |
| | CGAGTCGGTGCATGATC | |
| | CTGACGACGGAGACCGC | |
| | CGTCGTCGACAAGCCGG | |
| | GACAGCATAT | |
| | (SEQ ID NO: 873) | |
| 874 | GACTAAATATGCTGTCC | 3′ pegRNA, |
| | CATGGTTTTAGAGCTAG | trans- |
| | AAATAGCAAGTTAAAAT | cription |
| | AAGGCTAGTCCGTTATC | adaptation |
| | AACTTGAAAAAGTGGCA | (5′G, 3′ |
| | CCGAGTCGGTGCATGAT | TTTTTTT, |
| | CCTGACGACGGAGACCG | 3′A) |
| | CCGTCGTCGACAAGCCG | |
| | GGACAGCATATATTTTT | |
| | TT | |
| | (SEQ ID NO: 874) | |
| 875 | ACTAAATATGCTGTCCC | 3′ pegRNA |
| | ATGGTTTTAGAGCTAGA | |
| | AATAGCAAGTTAAAATA | |
| | AGGCTAGTCCGTTATCA | |
| | ACTTGAAAAAGTGGCAC | |
| | CGAGTCGGTGCATGATC | |
| | CTGACGACGGAGACCGC | |
| | CGTCGTCGACAAGCCGG | |
| | GACAGCAT | |
| | (SEQ ID NO: 875) | |
| 876 | GACTAAATATGCTGTCC | 3′ pegRNA, |
| | CATGGTTTTAGAGCTAG | trans- |
| | AAATAGCAAGTTAAAAT | cription |
| | AAGGCTAGTCCGTTATC | adaptation |
| | AACTTGAAAAAGTGGCA | (5′G, 3′ |
| | CCGAGTCGGTGCATGAT | TTTTTTT) |
| | CCTGACGACGGAGACCG | |
| | CCGTCGTCGACAAGCCG | |
| | GGACAGCATTTTTTTT | |
| | (SEQ ID NO: 876) | |
| 878 | ACTAAATATGCTGTCCC | 3′ pegRNA, |
| | ATGGTTTTAGAGCTAGA | trans- |
| | AATAGCAAGTTAAAATA | cription |
| | AGGCTAGTCCGTTATCA | adaptation |
| | ACTTGAAAAAGTGGCAC | (3′TTTT) |
| | CGAGTCGGTGCATGATC | |
| | CTGACGACGGAGACCGC | |
| | CGTCGTCGACAAGCCGG | |
| | GACAGCATATATTTT | |
| | (SEQ ID NO: 878) | |
| 879 | ACTAAATATGCTGTCCC | 3′ pegRNA |
| | ATGGTTTTAGAGCTAGA | |
| | AATAGCAAGTTAAAATA | |
| | AGGCTAGTCCGTTATCA | |
| | ACTTGAAAAAGTGGCAC | |
| | CGAGTCGGTGCATGATC | |
| | CTGACGACGGAGACCGC | |
| | CGTCGTCGACAAGCCGG | |
| | GACAGCATATA | |
| | (SEQ ID NO: 879) | |
| 880 | ACTAAATATGCTGTCCC | 3′ pegRNA, |
| | ATGGTTTTAGAGCTAGA | trans- |
| | AATAGCAAGTTAAAATA | cription |
| | AGGCTAGTCCGTTATCA | adaptation |
| | ACTTGAAAAAGTGGCAC | (3′TTTT) |
| | CGAGTCGGTGCATGATC | |
| | CTGACGACGGAGACCGC | |
| | CGTCGTCGACAAGCCGG | |
| | GACAGCATTTTT | |
| | (SEQ ID NO: 880) | |

TABLE 20
Exemplary 3′ PEgRNA and component sequence

| Sequence | | |
|---|---|---|
| number | Sequence | Description |
| 881 | AAAAAACATAGGCTGCC | 3′ Spacer |
| | TCG | |
| | (SEQ ID NO: 881) | |
| 882 | AAACATAGGCTGCCTCG | 3′ Spacer |
| | (SEQ ID NO: 882) | |
| 883 | AAAACATAGGCTGCCTC | 3′ Spacer |
| | G | |
| | (SEQ ID NO: 883) | |
| 884 | AAAAACATAGGCTGCCT | 3′ Spacer |
| | CG | |
| | (SEQ ID NO: 884) | |
| 885 | CAAAAAACATAGGCTGC | 3′ Spacer |
| | CTCG | |
| | (SEQ ID NO: 885) | |
| 886 | TCAAAAAACATAGGCTG | 3′ Spacer |
| | CCTCG | |
| | (SEQ ID NO: 886) | |
| 887 | GGCAG | 3′ PBS |
| 888 | GGCAGC | 3′ PBS |
| 889 | GGCAGCC | 3′ PBS |
| 890 | GGCAGCCT | 3′ PBS |
| 891 | GGCAGCCTA | 3′ PBS |
| 892 | GGCAGCCTAT | 3′ PBS |
| | (SEQ ID NO: 892) | |
| 893 | GGCAGCCTATG | 3′ PBS |
| | (SEQ ID NO: 893) | |
| 894 | GGCAGCCTATGT | 3′ PBS |
| | (SEQ ID NO: 894) | |
| 895 | GGCAGCCTATGTT | 3′ PBS |
| | (SEQ ID NO: 895) | |
| 896 | GGCAGCCTATGTTT | 3′ PBS |
| | (SEQ ID NO: 896) | |
| 897 | GGCAGCCTATGTTTT | 3′ PBS |
| | (SEQ ID NO: 897) | |
| 898 | GGCAGCCTATGTTTTT | 3′ PBS |
| | (SEQ ID NO: 898) | |
| 899 | GGCAGCCTATGTTTTTT | 3′ PBS |
| | (SEQ ID NO: 899) | |
| 900 | GGCAGCCTATGTTTTTT | 3′ PBS |
| | G | |
| | (SEQ ID NO: 900) | |
| 901 | GGCAGCCTATGTTTTTT | 3′ PBS |
| | GA | |
| | (SEQ ID NO: 901) | |
| 902 | AAAAAACATAGGCTGCC | 3′ pegRNA |
| | TCGGTTTTAGAGCTAGA | |
| | AATAGCAAGTTAAAATA | |
| | AGGCTAGTCCGTTATCA | |
| | ACTTGAAAAAGTGGCAC | |
| | CGAGTCGGTGCATGATC | |
| | CTGACGACGGAGACCGC | |
| | CGTCGTCGACAAGCCGG | |
| | CAGCCTATGT | |
| | (SEQ ID NO: 902) | |
| 903 | GAAAAAACATAGGCTGC | 3′ pegRNA, |
| | CTCGGTTTTAGAGCTAG | trans- |
| | AAATAGCAAGTTAAAAT | cription |
| | AAGGCTAGTCCGTTATC | adaptation |
| | AACTTGAAAAAGTGGCA | (5′G, 3′ |
| | CCGAGTCGGTGCATGAT | TTTTTTT, |
| | CCTGACGACGGAGACCG | 3′A) |
| | CCGTCGTCGACAAGCCG | |
| | GCAGCCTATGTATTTTT | |
| | TT | |
| | (SEQ ID NO: 903) | |
| 904 | AAAAAACATAGGCTGCC | 3′ pegRNA |
| | TCGGTTTTAGAGCTAGA | |
| | AATAGCAAGTTAAAATA | |
| | AGGCTAGTCCGTTATCA | |
| | ACTTGAAAAAGTGGCAC | |
| | CGAGTCGGTGCATGATC | |
| | CTGACGACGGAGACCGC | |
| | CGTCGTCGACAAGCCGG | |
| | CAGCCTAT | |
| | (SEQ ID NO: 904) | |
| 905 | GAAAAAACATAGGCTGC | 3′ pegRNA, |
| | CTCGGTTTTAGAGCTAG | trans- |
| | AAATAGCAAGTTAAAAT | cription |
| | AAGGCTAGTCCGTTATC | adaptation |
| | AACTTGAAAAAGTGGCA | (5′G, 3′ |
| | CCGAGTCGGTGCATGAT | TTTTTTT) |
| | CCTGACGACGGAGACCG | |
| | CCGTCGTCGACAAGCCG | |
| | GCAGCCTATTTTTTTT | |
| | (SEQ ID NO: 905) | |
| 907 | AAAAAACATAGGCTGCC | 3′ pegRNA, |
| | TCGGTTTTAGAGCTAGA | trans- |
| | AATAGCAAGTTAAAATA | cription |
| | AGGCTAGTCCGTTATCA | adaptation |
| | ACTTGAAAAAGTGGCAC | (3′TTTT) |
| | CGAGTCGGTGCATGATC | |
| | CTGACGACGGAGACCGC | |
| | CGTCGTCGACAAGCCGG | |
| | CAGCCTATGTATTTT | |
| | (SEQ ID NO: 907) | |
| 908 | AAAAAACATAGGCTGCC | 3′ pegRNA |
| | TCGGTTTTAGAGCTAGA | |
| | AATAGCAAGTTAAAATA | |
| | AGGCTAGTCCGTTATCA | |
| | ACTTGAAAAAGTGGCAC | |
| | CGAGTCGGTGCATGATC | |
| | CTGACGACGGAGACCGC | |
| | CGTCGTCGACAAGCCGG | |
| | CAGCCTATGTA | |
| | (SEQ ID NO: 908) | |
| 909 | AAAAAACATAGGCTGCC | 3′ pegRNA, |
| | TCGGTTTTAGAGCTAGA | trans- |
| | AATAGCAAGTTAAAATA | cription |
| | AGGCTAGTCCGTTATCA | adaptation |
| | ACTTGAAAAAGTGGCAC | (3′TTTT) |
| | CGAGTCGGTGCATGATC | |
| | CTGACGACGGAGACCGC | |
| | CGTCGTCGACAAGCCGG | |
| | CAGCCTATTTTT | |
| | (SEQ ID NO: 909) | |

TABLE 21
Exemplary 3′ PEgRNA and component sequence

| Sequence | | |
|---|---|---|
| number | Sequence | Description |
| 910 | AGCTGTCTCCGGTATTT | 3′ Spacer |
| | AAG | |
| | (SEQ ID NO: 910) | |
| 911 | TGTCTCCGGTATTTAAG | 3′ Spacer |
| | (SEQ ID NO: 911) | |
| 912 | CTGTCTCCGGTATTTAA | 3′ Spacer |
| | G | |
| | (SEQ ID NO: 912) | |
| 913 | GCTGTCTCCGGTATTTA | 3′ Spacer |
| | AG | |
| | (SEQ ID NO: 913) | |
| 914 | AAGCTGTCTCCGGTATT | 3′ Spacer |
| | TAAG | |
| | (SEQ ID NO: 914) | |
| 915 | GAAGCTGTCTCCGGTAT | 3′ Spacer |
| | TTAAG | |
| | (SEQ ID NO: 915) | |
| 916 | AAATA | 3′ PBS |
| 917 | AAATAC | 3′ PBS |
| 918 | AAATACC | 3′ PBS |
| 919 | AAATACCG | 3′ PBS |
| 920 | AAATACCGG | 3′ PBS |
| 921 | AAATACCGGA | 3′ PBS |
| | (SEQ ID NO: 921) | |
| 922 | AAATACCGGAG | 3′ PBS |
| | (SEQ ID NO: 922) | |
| 923 | AAATACCGGAGA | 3′ PBS |
| | (SEQ ID NO: 923) | |
| 924 | AAATACCGGAGAC | 3′ PBS |
| | (SEQ ID NO: 924) | |
| 925 | AAATACCGGAGACA | 3′ PBS |
| | (SEQ ID NO: 925) | |
| 926 | AAATACCGGAGACAG | 3′ PBS |
| | (SEQ ID NO: 926) | |
| 927 | AAATACCGGAGACAGC | 3′ PBS |
| | (SEQ ID NO: 927) | |
| 928 | AAATACCGGAGACAGCT | 3′ PBS |
| | (SEQ ID NO: 928) | |
| 929 | AAATACCGGAGACAGCT | 3′ PBS |
| | T | |
| | (SEQ ID NO: 929) | |
| 930 | AAATACCGGAGACAGCT | 3′ PBS |
| | TC | |
| | (SEQ ID NO: 930) | |
| 931 | AGCTGTCTCCGGTATTT | 3′ pegRNA |
| | AAGGTTTTAGAGCTAGA | |
| | AATAGCAAGTTAAAATA | |
| | AGGCTAGTCCGTTATCA | |
| | ACTTGAAAAAGTGGCAC | |
| | CGAGTCGGTGCATGATC | |
| | CTGACGACGGAGACCGC | |
| | CGTCGTCGACAAGCCAA | |
| | ATACCGGAGA | |
| | (SEQ ID NO: 931) | |
| 932 | GAGCTGTCTCCGGTATT | 3′ pegRNA, |
| | TAAGGTTTTAGAGCTAG | trans- |
| | AAATAGCAAGTTAAAAT | cription |
| | AAGGCTAGTCCGTTATC | adaptation |
| | AACTTGAAAAAGTGGCA | (5′G, 3′ |
| | CCGAGTCGGTGCATGAT | TTTTTTT) |
| | CCTGACGACGGAGACCG | |
| | CCGTCGTCGACAAGCCA | |
| | AATACCGGAGATTTTTT | |
| | T | |
| | (SEQ ID NO: 932) | |
| 933 | AGCTGTCTCCGGTATTT | 3′ pegRNA |
| | AAGGTTTTAGAGCTAGA | |
| | AATAGCAAGTTAAAATA | |
| | AGGCTAGTCCGTTATCA | |
| | ACTTGAAAAAGTGGCAC | |
| | CGAGTCGGTGCATGATC | |
| | CTGACGACGGAGACCGC | |
| | CGTCGTCGACAAGCCAA | |
| | ATACCGGA | |
| | (SEQ ID NO: 933) | |
| 934 | GAGCTGTCTCCGGTATT | 3′ pegRNA, |
| | TAAGGTTTTAGAGCTAG | trans- |
| | AAATAGCAAGTTAAAAT | cription |
| | AAGGCTAGTCCGTTATC | adaptation |
| | AACTTGAAAAAGTGGCA | (5′G, 3′ |
| | CCGAGTCGGTGCATGAT | TTTTTTT) |
| | CCTGACGACGGAGACCG | |
| | CCGTCGTCGACAAGCCA | |
| | AATACCGGATTTTTTT | |
| | (SEQ ID NO: 934) | |
| 935 | AGCTGTCTCCGGTATTT | 3′ pegRNA, |
| | AAGGTTTTAGAGCTAGA | trans- |
| | AATAGCAAGTTAAAATA | cription |
| | AGGCTAGTCCGTTATCA | adaptation |
| | ACTTGAAAAAGTGGCAC | (3′TTTT) |
| | CGAGTCGGTGCATGATC | |
| | CTGACGACGGAGACCGC | |
| | CGTCGTCGACAAGCCAA | |
| | ATACCGGAGATTTT | |
| | (SEQ ID NO: 935) | |
| 936 | AGCTGTCTCCGGTATTT | 3′ pegRNA, |
| | AAGGTTTTAGAGCTAGA | trans- |
| | AATAGCAAGTTAAAATA | cription |
| | AGGCTAGTCCGTTATCA | adaptation |
| | ACTTGAAAAAGTGGCAC | (3′TTTT) |
| | CGAGTCGGTGCATGATC | |
| | CTGACGACGGAGACCGC | |
| | CGTCGTCGACAAGCCAA | |
| | ATACCGGATTTT | |
| | (SEQ ID NO: 936) | |

TABLE 22
Exemplary 3′ PEgRNA and component sequence

| Sequence | | |
|---|---|---|
| number | Sequence | Description |
| 937 | AGAAAAGAAAAAGACAC | 3′ Spacer |
| | CTG | |
| | (SEQ ID NO: 937) | |
| 938 | AAAGAAAAAGACACCTG | 3′ Spacer |
| | (SEQ ID NO: 938) | |
| 939 | AAAAGAAAAAGACACCT | 3′ Spacer |
| | G | |
| | (SEQ ID NO: 939) | |
| 940 | GAAAAGAAAAAGACACC | 3′ Spacer |
| | TG | |
| | (SEQ ID NO: 940) | |
| 941 | AAGAAAAGAAAAAGACA | 3′ Spacer |
| | CCTG | |
| | (SEQ ID NO: 941) | |
| 942 | TAAGAAAAGAAAAAGAC | 3′ Spacer |
| | ACCTG | |
| | (SEQ ID NO: 942) | |
| 943 | GTGTC | 3′ PBS |
| 944 | GTGTCT | 3′ PBS |
| 945 | GTGTCTT | 3′ PBS |
| 946 | GTGTCTTT | 3′ PBS |
| 947 | GTGTCTTTT | 3′ PBS |
| 948 | GTGTCTTTTT | 3′ PBS |
| | (SEQ ID NO: 948) | |
| 949 | GTGTCTTTTTC | 3′ PBS |
| | (SEQ ID NO: 949) | |
| 950 | GTGTCTTTTTCT | 3′ PBS |
| | (SEQ ID NO: 950) | |
| 951 | GTGTCTTTTTCTT | 3′ PBS |
| | (SEQ ID NO: 951) | |
| 952 | GTGTCTTTTTCTTT | 3′ PBS |
| | (SEQ ID NO: 952) | |
| 953 | GTGTCTTTTTCTTTT | 3′ PBS |
| | (SEQ ID NO: 953) | |
| 954 | GTGTCTTTTTCTTTTC | 3′ PBS |
| | (SEQ ID NO: 954) | |
| 955 | GTGTCTTTTTCTTTTCT | 3′ PBS |
| | (SEQ ID NO: 955) | |
| 956 | GTGTCTTTTTCTTTTCT | 3′ PBS |
| | T | |
| | (SEQ ID NO: 956) | |
| 957 | GTGTCTTTTTCTTTTCT | 3′ PBS |
| | TA | |
| | (SEQ ID NO: 957) | |
| 958 | AGAAAAGAAAAAGACAC | 3′ pegRNA |
| | CTGGTTTTAGAGCTAGA | |
| | AATAGCAAGTTAAAATA | |
| | AGGCTAGTCCGTTATCA | |
| | ACTTGAAAAAGTGGCAC | |
| | CGAGTCGGTGCATGATC | |
| | CTGACGACGGAGACCGC | |
| | CGTCGTCGACAAGCCGT | |
| | GTCTTTTTCT | |
| | (SEQ ID NO: 958) | |
| 959 | GAGAAAAGAAAAAGACA | 3′ pegRNA, |
| | CCTGGTTTTAGAGCTAG | trans- |
| | AAATAGCAAGTTAAAAT | cription |
| | AAGGCTAGTCCGTTATC | adaptation |
| | AACTTGAAAAAGTGGCA | (5′G, 3′ |
| | CCGAGTCGGTGCATGAT | TTTTTTT, |
| | CCTGACGACGGAGACCG | 3′A) |
| | CCGTCGTCGACAAGCCG | |
| | TGTCTTTTTCTATTTTT | |
| | TT | |
| | (SEQ ID NO: 959) | |
| 960 | AGAAAAGAAAAAGACAC | 3′ pegRNA |
| | CTGGTTTTAGAGCTAGA | |
| | AATAGCAAGTTAAAATA | |
| | AGGCTAGTCCGTTATCA | |
| | ACTTGAAAAAGTGGCAC | |
| | CGAGTCGGTGCATGATC | |
| | CTGACGACGGAGACCGC | |
| | CGTCGTCGACAAGCCGT | |
| | GTCTTTTTC | |
| | (SEQ ID NO: 960) | |
| 961 | GAGAAAAGAAAAAGACA | 3′ pegRNA, |
| | CCTGGTTTTAGAGCTAG | trans- |
| | AAATAGCAAGTTAAAAT | cription |
| | AAGGCTAGTCCGTTATC | adaptation |
| | AACTTGAAAAAGTGGCA | (5′G, 3′ |
| | CCGAGTCGGTGCATGAT | TTTTTTT) |
| | CCTGACGACGGAGACCG | |
| | CCGTCGTCGACAAGCCG | |
| | TGTCTTTTTCTTTTTTT | |
| | (SEQ ID NO: 961) | |
| 963 | AGAAAAGAAAAAGACAC | 3′ pegRNA, |
| | CTGGTTTTAGAGCTAGA | trans- |
| | AATAGCAAGTTAAAATA | cription |
| | AGGCTAGTCCGTTATCA | adaptation |
| | ACTTGAAAAAGTGGCAC | (3′TTTT) |
| | CGAGTCGGTGCATGATC | |
| | CTGACGACGGAGACCGC | |
| | CGTCGTCGACAAGCCGT | |
| | GTCTTTTTCTATTTT | |
| | (SEQ ID NO: 963) | |
| 964 | AGAAAAGAAAAAGACAC | 3′ pegRNA |
| | CTGGTTTTAGAGCTAGA | |
| | AATAGCAAGTTAAAATA | |
| | AGGCTAGTCCGTTATCA | |
| | ACTTGAAAAAGTGGCAC | |
| | CGAGTCGGTGCATGATC | |
| | CTGACGACGGAGACCGC | |
| | CGTCGTCGACAAGCCGT | |
| | GTCTTTTTCTA | |
| | (SEQ ID NO: 964) | |
| 965 | AGAAAAGAAAAAGACAC | 3′ pegRNA, |
| | CTGGTTTTAGAGCTAGA | trans- |
| | AATAGCAAGTTAAAATA | cription |
| | AGGCTAGTCCGTTATCA | adaptation |
| | ACTTGAAAAAGTGGCAC | (3′TTTT) |
| | CGAGTCGGTGCATGATC | |
| | CTGACGACGGAGACCGC | |
| | CGTCGTCGACAAGCCGT | |
| | GTCTTTTTCTTTT | |
| | (SEQ ID NO: 965) | |

TABLE 23
Exemplary 3′ PERNA and component sequence

| Sequence | | |
|---|---|---|
| number | Sequence | Description |
| 966 | AAAGGTCATAGGATCAC | 3′ Spacer |
| | AGG | |
| | (SEQ ID NO: 966) | |
| 967 | GGTCATAGGATCACAGG | 3′ Spacer |
| | (SEQ ID NO: 967) | |
| 968 | AGGTCATAGGATCACAG | 3′ Spacer |
| | G | |
| | (SEQ ID NO: 968) | |
| 969 | AAGGTCATAGGATCACA | 3′ Spacer |
| | GG | |
| | (SEQ ID NO: 969) | |
| 970 | AAAAGGTCATAGGATCA | 3′ Spacer |
| | CAGG | |
| | (SEQ ID NO: 970) | |
| 971 | CAAAAGGTCATAGGATC | 3′ Spacer |
| | ACAGG | |
| | (SEQ ID NO: 971) | |
| 397 | GTGAT | 3′ PBS |
| 398 | GTGATC | 3′ PBS |
| 399 | GTGATCC | 3′ PBS |
| 972 | GTGATCCT | 3′ PBS |
| 973 | GTGATCCTA | 3′ PBS |
| 974 | GTGATCCTAT | 3′ PBS |
| | (SEQ ID NO: 974) | |
| 975 | GTGATCCTATG | 3′ PBS |
| | (SEQ ID NO: 975) | |
| 976 | GTGATCCTATGA | 3′ PBS |
| | (SEQ ID NO: 976) | |
| 977 | GTGATCCTATGAC | 3′ PBS |
| | (SEQ ID NO: 977) | |
| 978 | GTGATCCTATGACC | 3′ PBS |
| | (SEQ ID NO: 978) | |
| 979 | GTGATCCTATGACCT | 3′ PBS |
| | (SEQ ID NO: 979) | |
| 980 | GTGATCCTATGACCTT | 3′ PBS |
| | (SEQ ID NO: 980) | |
| 981 | GTGATCCTATGACCTTT | 3′ PBS |
| | (SEQ ID NO: 981) | |
| 982 | GTGATCCTATGACCTTT | 3′ PBS |
| | T | |
| | (SEQ ID NO: 982) | |
| 983 | GTGATCCTATGACCTTT | 3′ PBS |
| | TG | |
| | (SEQ ID NO: 983) | |
| 984 | AAAGGTCATAGGATCAC | 3′ pegRNA |
| | AGGGTTTTAGAGCTAGA | |
| | AATAGCAAGTTAAAATA | |
| | AGGCTAGTCCGTTATCA | |
| | ACTTGAAAAAGTGGCAC | |
| | CGAGTCGGTGCATGATC | |
| | CTGACGACGGAGACCGC | |
| | CGTCGTCGACAAGCCGT | |
| | GATCCTATGA | |
| | (SEQ ID NO: 984) | |
| 985 | GAAAGGTCATAGGATCA | 3′ pegRNA, |
| | CAGGGTTTTAGAGCTAG | trans- |
| | AAATAGCAAGTTAAAAT | cription |
| | AAGGCTAGTCCGTTATC | adaptation |
| | AACTTGAAAAAGTGGCA | (5′G, 3′ |
| | CCGAGTCGGTGCATGAT | TTTTTTT) |
| | CCTGACGACGGAGACCG | |
| | CCGTCGTCGACAAGCCG | |
| | TGATCCTATGATTTTTT | |
| | T | |
| | (SEQ ID NO: 985) | |
| 986 | AAAGGTCATAGGATCAC | 3′ pegRNA |
| | AGGGTTTTAGAGCTAGA | |
| | AATAGCAAGTTAAAATA | |
| | AGGCTAGTCCGTTATCA | |
| | ACTTGAAAAAGTGGCAC | |
| | CGAGTCGGTGCATGATC | |
| | CTGACGACGGAGACCGC | |
| | CGTCGTCGACAAGCCGT | |
| | GATCCTAT | |
| | (SEQ ID NO: 986) | |
| 987 | GAAAGGTCATAGGATCA | 3′ pegRNA, |
| | CAGGGTTTTAGAGCTAG | trans- |
| | AAATAGCAAGTTAAAAT | cription |
| | AAGGCTAGTCCGTTATC | adaptation |
| | AACTTGAAAAAGTGGCA | (5′G, 3′ |
| | CCGAGTCGGTGCATGAT | TTTTTTT) |
| | CCTGACGACGGAGACCG | |
| | CCGTCGTCGACAAGCCG | |
| | TGATCCTATTTTTTTT | |
| | (SEQ ID NO: 987) | |
| 988 | AAAGGTCATAGGATCAC | 3′ pegRNA, |
| | AGGGTTTTAGAGCTAGA | trans- |
| | AATAGCAAGTTAAAATA | cription |
| | AGGCTAGTCCGTTATCA | adaptation |
| | ACTTGAAAAAGTGGCAC | (3′TTTT) |
| | CGAGTCGGTGCATGATC | |
| | CTGACGACGGAGACCGC | |
| | CGTCGTCGACAAGCCGT | |
| | GATCCTATGATTTT | |
| | (SEQ ID NO: 988) | |
| 989 | AAAGGTCATAGGATCAC | 3′ pegRNA, |
| | AGGGTTTTAGAGCTAGA | trans- |
| | AATAGCAAGTTAAAATA | cription |
| | AGGCTAGTCCGTTATCA | adaptation |
| | ACTTGAAAAAGTGGCAC | (3′TTTT) |
| | CGAGTCGGTGCATGATC | |
| | CTGACGACGGAGACCGC | |
| | CGTCGTCGACAAGCCGT | |
| | GATCCTATTTTT | |
| | (SEQ ID NO: 989) | |

TABLE 24
Exemplary 3′ PEgRNA and component sequence

| Sequence | | |
|---|---|---|
| number | Sequence | Description |
| 990 | CATACCTCATCACCTCC | 3′ Spacer |
| | CAA | |
| | (SEQ ID NO: 990) | |
| 991 | ACCTCATCACCTCCCAA | 3′ Spacer |
| | (SEQ ID NO: 991) | |
| 992 | TACCTCATCACCTCCCA | 3′ Spacer |
| | A | |
| | (SEQ ID NO: 992) | |
| 993 | ATACCTCATCACCTCCC | 3′ Spacer |
| | AA | |
| | (SEQ ID NO: 993) | |
| 994 | TCATACCTCATCACCTC | 3′ Spacer |
| | CCAA | |
| | (SEQ ID NO: 994) | |
| 995 | CTCATACCTCATCACCT | 3′ Spacer |
| | CCCAA | |
| | (SEQ ID NO: 995) | |
| 996 | GGAGG | 3′ PBS |
| 997 | GGAGGT | 3′ PBS |
| 998 | GGAGGTG | 3′ PBS |
| 999 | GGAGGTGA | 3′ PBS |
| 1000 | GGAGGTGAT | 3′ PBS |
| 1001 | GGAGGTGATG | 3′ PBS |
| | (SEQ ID NO: 1001) | |
| 1002 | GGAGGTGATGA | 3′ PBS |
| | (SEQ ID NO: 1002) | |
| 1003 | GGAGGTGATGAG | 3′ PBS |
| | (SEQ ID NO: 1003) | |
| 1004 | GGAGGTGATGAGG | 3′ PBS |
| | (SEQ ID NO: 1004) | |
| 1005 | GGAGGTGATGAGGT | 3′ PBS |
| | (SEQ ID NO: 1005) | |
| 1006 | GGAGGTGATGAGGTA | 3′ PBS |
| | (SEQ ID NO: 1006) | |
| 1007 | GGAGGTGATGAGGTAT | 3′ PBS |
| | (SEQ ID NO: 1007) | |
| 1008 | GGAGGTGATGAGGTATG | 3′ PBS |
| | (SEQ ID NO: 1008) | |
| 1009 | GGAGGTGATGAGGTATG | 3′ PBS |
| | A | |
| | (SEQ ID NO: 1009) | |
| 1010 | GGAGGTGATGAGGTATG | 3′ PBS |
| | AG | |
| | (SEQ ID NO: 1010) | |
| 1011 | CATACCTCATCACCTCC | 3′ pegRNA |
| | CAAGTTTTAGAGCTAGA | |
| | AATAGCAAGTTAAAATA | |
| | AGGCTAGTCCGTTATCA | |
| | ACTTGAAAAAGTGGCAC | |
| | CGAGTCGGTGCATGATC | |
| | CTGACGACGGAGACCGC | |
| | CGTCGTCGACAAGCCGG | |
| | AGGTGATGAG | |
| | (SEQ ID NO: 1011) | |
| 1012 | GCATACCTCATCACCTC | 3′ pegRNA, |
| | CCAAGTTTTAGAGCTAG | trans- |
| | AAATAGCAAGTTAAAAT | cription |
| | AAGGCTAGTCCGTTATC | adaptation |
| | AACTTGAAAAAGTGGCA | (5′G, 3′ |
| | CCGAGTCGGTGCATGAT | TTTTTTT) |
| | CCTGACGACGGAGACCG | |
| | CCGTCGTCGACAAGCCG | |
| | GAGGTGATGAGTTTTTT | |
| | T | |
| | (SEQ ID NO: 1012) | |
| 1013 | CATACCTCATCACCTCC | 3′ pegRNA |
| | CAAGTTTTAGAGCTAGA | |
| | AATAGCAAGTTAAAATA | |
| | AGGCTAGTCCGTTATCA | |
| | ACTTGAAAAAGTGGCAC | |
| | CGAGTCGGTGCATGATC | |
| | CTGACGACGGAGACCGC | |
| | CGTCGTCGACAAGCCGG | |
| | AGGTGATG | |
| | (SEQ ID NO: 1013) | |
| 1014 | GCATACCTCATCACCTC | 3′ pegRNA, |
| | CCAAGTTTTAGAGCTAG | trans- |
| | AAATAGCAAGTTAAAAT | cription |
| | AAGGCTAGTCCGTTATC | adaptation |
| | AACTTGAAAAAGTGGCA | (5′G, 3′ |
| | CCGAGTCGGTGCATGAT | TTTTTTT) |
| | CCTGACGACGGAGACCG | |
| | CCGTCGTCGACAAGCCG | |
| | GAGGTGATGTTTTTTT | |
| | (SEQ ID NO: 1014) | |
| 1015 | CATACCTCATCACCTCC | 3′ pegRNA, |
| | CAAGTTTTAGAGCTAGA | trans- |
| | AATAGCAAGTTAAAATA | cription |
| | AGGCTAGTCCGTTATCA | adaptation |
| | ACTTGAAAAAGTGGCAC | (3′TTTT) |
| | CGAGTCGGTGCATGATC | |
| | CTGACGACGGAGACCGC | |
| | CGTCGTCGACAAGCCGG | |
| | AGGTGATGAGTTTT | |
| | (SEQ ID NO: 1015) | |
| 1016 | CATACCTCATCACCTCC | 3′ pegRNA, |
| | CAAGTTTTAGAGCTAGA | trans- |
| | AATAGCAAGTTAAAATA | cription |
| | AGGCTAGTCCGTTATCA | adaptation |
| | ACTTGAAAAAGTGGCAC | (3′TTTT) |
| | CGAGTCGGTGCATGATC | |
| | CTGACGACGGAGACCGC | |
| | CGTCGTCGACAAGCCGG | |
| | AGGTGATGTTTT | |
| | (SEQ ID NO: 1016) | |

TABLE 25
Exemplary 3′ PEgRNA and component sequence

| Sequence | | |
|---|---|---|
| number | Sequence | Description |
| 1017 | GTGAAGACAAGGGCCTCCAG | 3′ Spacer |
| | (SEQ ID NO: 1017) | |
| 1018 | AAGACAAGGGCCTCCAG | 3′ Spacer |
| | (SEQ ID NO: 1018) | |
| 1019 | GAAGACAAGGGCCTCCAG | 3′ Spacer |
| | (SEQ ID NO: 1019) | |
| 1020 | TGAAGACAAGGGCCTCCAG | 3′ Spacer |
| | (SEQ ID NO: 1020) | |
| 1021 | GGTGAAGACAAGGGCCTCCAG | 3′ Spacer |
| | (SEQ ID NO: 1021) | |
| 1022 | GGGTGAAGACAAGGGCCTCCAG | 3′ Spacer |
| | (SEQ ID NO: 1022) | |
| 1023 | GAGGC | 3′ PBS |
| 1024 | GAGGCC | 3′ PBS |
| 1025 | GAGGCCC | 3′ PBS |
| 1026 | GAGGCCCT | 3′ PBS |
| 1027 | GAGGCCCTT | 3′ PBS |
| 1028 | GAGGCCCTTG | 3′ PBS |
| | (SEQ ID NO: 1028) | |
| 1029 | GAGGCCCTTGT | 3′ PBS |
| | (SEQ ID NO: 1029) | |
| 1030 | GAGGCCCTTGTC | 3′ PBS |
| | (SEQ ID NO: 1030) | |
| 1031 | GAGGCCCTTGTCT | 3′ PBS |
| | (SEQ ID NO: 1031) | |
| 1032 | GAGGCCCTTGTCTT | 3′ PBS |
| | (SEQ ID NO: 1032) | |
| 1033 | GAGGCCCTTGTCTTC | 3′ PBS |
| | (SEQ ID NO: 1033) | |
| 1034 | GAGGCCCTTGTCTTCA | 3′ PBS |
| | (SEQ ID NO: 1034) | |
| 1035 | GAGGCCCTTGTCTTCAC | 3′ PBS |
| | (SEQ ID NO: 1035) | |
| 1036 | GAGGCCCTTGTCTTCACC | 3′ PBS |
| | (SEQ ID NO: 1036) | |
| 1037 | GAGGCCCTTGTCTTCACCC | 3′ PBS |
| | (SEQ ID NO: 1037) | |
| 1038 | GTGAAGACAAGGGCCTCCAGGTTTTAGAGCTAG | 3′ pegRNA |
| | AAATAGCAAGTTAAAATAAGGCTAGTCCGTTAT | |
| | CAACTTGAAAAAGTGGCACCGAGTCGGTGCATG | |
| | ATCCTGACGACGGAGACCGCCGTCGTCGACAAG | |
| | CCGAGGCCCTTGTC | |
| | (SEQ ID NO: 1038) | |
| 1039 | GTGAAGACAAGGGCCTCCAGGTTTTAGAGCTAG | 3′ pegRNA, transcription |
| | AAATAGCAAGTTAAAATAAGGCTAGTCCGTTAT | adaptation (3′TTTTTTT, |
| | CAACTTGAAAAAGTGGCACCGAGTCGGTGCATG | 3′A) |
| | ATCCTGACGACGGAGACCGCCGTCGTCGACAAG | |
| | CCGAGGCCCTTGTCATTTTTTT | |
| | (SEQ ID NO: 1039) | |
| 1040 | GTGAAGACAAGGGCCTCCAGGTTTTAGAGCTAG | 3′ pegRNA |
| | AAATAGCAAGTTAAAATAAGGCTAGTCCGTTAT | |
| | CAACTTGAAAAAGTGGCACCGAGTCGGTGCATG | |
| | ATCCTGACGACGGAGACCGCCGTCGTCGACAAG | |
| | CCGAGGCCCTTG | |
| | (SEQ ID NO: 1040) | |
| 1041 | GTGAAGACAAGGGCCTCCAGGTTTTAGAGCTAG | 3′ pegRNA, transcription |
| | AAATAGCAAGTTAAAATAAGGCTAGTCCGTTAT | adaptation (3′TTTTTTT, |
| | CAACTTGAAAAAGTGGCACCGAGTCGGTGCATG | 3′A) |
| | ATCCTGACGACGGAGACCGCCGTCGTCGACAAG | |
| | CCGAGGCCCTTGATTTTTTT | |
| | (SEQ ID NO: 1041) | |
| 1042 | GTGAAGACAAGGGCCTCCAGGTTTTAGAGCTAG | 3′ pegRNA |
| | AAATAGCAAGTTAAAATAAGGCTAGTCCGTTAT | |
| | CAACTTGAAAAAGTGGCACCGAGTCGGTGCAAA | |
| | GTCTCATTTGACTTAGAGGCCCTTG | |
| | (SEQ ID NO: 1042) | |
| 1043 | GTGAAGACAAGGGCCTCCAGGTTTTAGAGCTAG | 3′ pegRNA, transcription |
| | AAATAGCAAGTTAAAATAAGGCTAGTCCGTTAT | adaptation (3′TTTTTTT) |
| | CAACTTGAAAAAGTGGCACCGAGTCGGTGCAAA | |
| | GTCTCATTTGACTTAGAGGCCCTTGTTTTTTT | |
| | (SEQ ID NO: 1043) | |
| 1044 | GTGAAGACAAGGGCCTCCAGGTTTTAGAGCTAG | 3′ pegRNA |
| | AAATAGCAAGTTAAAATAAGGCTAGTCCGTTAT | |
| | CAACTTGAAAAAGTGGCACCGAGTCGGTGCAGG | |
| | CAGGATCTTGAAATTGAGGCCCTTG | |
| | (SEQ ID NO: 1044) | |
| 1045 | GTGAAGACAAGGGCCTCCAGGTTTTAGAGCTAG | 3′ pegRNA, transcription |
| | AAATAGCAAGTTAAAATAAGGCTAGTCCGTTAT | adaptation (3′TTTTTTT) |
| | CAACTTGAAAAAGTGGCACCGAGTCGGTGCAGG | |
| | CAGGATCTTGAAATTGAGGCCCTTGTTTTTTT | |
| | (SEQ ID NO: 1045) | |
| 1046 | GTGAAGACAAGGGCCTCCAGGTTTTAGAGCTAG | 3′ pegRNA |
| | AAATAGCAAGTTAAAATAAGGCTAGTCCGTTAT | |
| | CAACTTGAAAAAGTGGCACCGAGTCGGTGCGTA | |
| | CATGGCAGAGAGCAAGAGGCCCTTG | |
| | (SEQ ID NO: 1046) | |
| 1047 | GTGAAGACAAGGGCCTCCAGGTTTTAGAGCTAG | 3′ pegRNA, transcription |
| | AAATAGCAAGTTAAAATAAGGCTAGTCCGTTAT | adaptation (3′TTTTTTT) |
| | CAACTTGAAAAAGTGGCACCGAGTCGGTGCGTA | |
| | CATGGCAGAGAGCAAGAGGCCCTTGTTTTTTT | |
| | (SEQ ID NO: 1047) | |
| 1048 | GTGAAGACAAGGGCCTCCAGGTTTTAGAGCTAG | 3′ pegRNA |
| | AAATAGCAAGTTAAAATAAGGCTAGTCCGTTAT | |
| | CAACTTGAAAAAGTGGCACCGAGTCGGTGCAGA | |
| | ACGGCCAAAGGTGAGGCCCTTG | |
| | (SEQ ID NO: 1048) | |
| 1049 | GTGAAGACAAGGGCCTCCAGGTTTTAGAGCTAG | 3′ pegRNA, transcription |
| | AAATAGCAAGTTAAAATAAGGCTAGTCCGTTAT | adaptation (3′TTTTTTT) |
| | CAACTTGAAAAAGTGGCACCGAGTCGGTGCAGA | |
| | ACGGCCAAAGGTGAGGCCCTTGTTTTTTT | |
| | (SEQ ID NO: 1049) | |
| 1050 | GTGAAGACAAGGGCCTCCAGGTTTTAGAGCTAG | 3′ pegRNA |
| | AAATAGCAAGTTAAAATAAGGCTAGTCCGTTAT | |
| | CAACTTGAAAAAGTGGCACCGAGTCGGTGCACC | |
| | CAAGAGGAGGGCAGAGAGGCCCTTG | |
| | (SEQ ID NO: 1050) | |
| 1051 | GTGAAGACAAGGGCCTCCAGGTTTTAGAGCTAG | 3′ pegRNA, transcription |
| | AAATAGCAAGTTAAAATAAGGCTAGTCCGTTAT | adaptation (3′TTTTTTT) |
| | CAACTTGAAAAAGTGGCACCGAGTCGGTGCACC | |
| | CAAGAGGAGGGCAGAGAGGCCCTTGTTTTTTT | |
| | (SEQ ID NO: 1051) | |
| 1052 | GTGAAGACAAGGGCCTCCAGGTTTTAGAGCTAG | 3′ pegRNA |
| | AAATAGCAAGTTAAAATAAGGCTAGTCCGTTAT | |
| | CAACTTGAAAAAGTGGCACCGAGTCGGTGCGGA | |
| | CGGCCCGTACATGAGGCCCTTG | |
| | (SEQ ID NO: 1052) | |
| 1053 | GTGAAGACAAGGGCCTCCAGGTTTTAGAGCTAG | 3′ pegRNA, transcription |
| | AAATAGCAAGTTAAAATAAGGCTAGTCCGTTAT | adaptation (3′TTTTTTT) |
| | CAACTTGAAAAAGTGGCACCGAGTCGGTGCGGA | |
| | CGGCCCGTACATGAGGCCCTTGTTTTTTT | |
| | (SEQ ID NO: 1053) | |
| 1054 | GTGAAGACAAGGGCCTCCAGGTTTTAGAGCTAG | 3′ pegRNA |
| | AAATAGCAAGTTAAAATAAGGCTAGTCCGTTAT | |
| | CAACTTGAAAAAGTGGCACCGAGTCGGTGCAGG | |
| | CCTGGCGTCCAGGCCGAGGCCCTTG | |
| | (SEQ ID NO: 1054) | |
| 1055 | GTGAAGACAAGGGCCTCCAGGTTTTAGAGCTAG | 3′ pegRNA, transcription |
| | AAATAGCAAGTTAAAATAAGGCTAGTCCGTTAT | adaptation (3′TTTTTTT) |
| | CAACTTGAAAAAGTGGCACCGAGTCGGTGCAGG | |
| | CCTGGCGTCCAGGCCGAGGCCCTTGTTTTTTT | |
| | (SEQ ID NO: 1055) | |
| 1056 | GTGAAGACAAGGGCCTCCAGGTTTTAGAGCTAG | 3′ pegRNA |
| | AAATAGCAAGTTAAAATAAGGCTAGTCCGTTAT | |
| | CAACTTGAAAAAGTGGCACCGAGTCGGTGCAGC | |
| | CGCCGTGCGGCAGAGGCCCTTG | |
| | (SEQ ID NO: 1056) | |
| 1057 | GTGAAGACAAGGGCCTCCAGGTTTTAGAGCTAG | 3′ pegRNA, transcription |
| | AAATAGCAAGTTAAAATAAGGCTAGTCCGTTAT | adaptation (3′TTTTTTT) |
| | CAACTTGAAAAAGTGGCACCGAGTCGGTGCAGC | |
| | CGCCGTGCGGCAGAGGCCCTTGTTTTTTT | |
| | (SEQ ID NO: 1057) | |
| 1058 | GTGAAGACAAGGGCCTCCAGGTTTTAGAGCTAG | 3′ pegRNA |
| | AAATAGCAAGTTAAAATAAGGCTAGTCCGTTAT | |
| | CAACTTGAAAAAGTGGCACCGAGTCGGTGCTCA | |
| | TACACAGAGCAAACTCCAAGAGGCCCTTG | |
| | (SEQ ID NO: 1058) | |
| 1059 | GTGAAGACAAGGGCCTCCAGGTTTTAGAGCTAG | 3′ pegRNA, transcription |
| | AAATAGCAAGTTAAAATAAGGCTAGTCCGTTAT | adaptation (3′TTTTTTT) |
| | CAACTTGAAAAAGTGGCACCGAGTCGGTGCTCA | |
| | TACACAGAGCAAACTCCAAGAGGCCCTTGTTTTT | |
| | TT | |
| | (SEQ ID NO: 1059) | |
| 1060 | GTGAAGACAAGGGCCTCCAGGTTTTAGAGCTAG | 3′ pegRNA |
| | AAATAGCAAGTTAAAATAAGGCTAGTCCGTTAT | |
| | CAACTTGAAAAAGTGGCACCGAGTCGGTGCACA | |
| | GCACCATCTAGTGTAAAGAGGCCCTTG | |
| | (SEQ ID NO: 1060) | |
| 1061 | GTGAAGACAAGGGCCTCCAGGTTTTAGAGCTAG | 3′ pegRNA, transcription |
| | AAATAGCAAGTTAAAATAAGGCTAGTCCGTTAT | adaptation (3′TTTTTTT) |
| | CAACTTGAAAAAGTGGCACCGAGTCGGTGCACA | |
| | GCACCATCTAGTGTAAAGAGGCCCTTGTTTTTTT | |
| | (SEQ ID NO: 1061) | |
| 1062 | GTGAAGACAAGGGCCTCCAGGTTTTAGAGCTAG | 3′ pegRNA |
| | AAATAGCAAGTTAAAATAAGGCTAGTCCGTTAT | |
| | CAACTTGAAAAAGTGGCACCGAGTCGGTGCCTC | |
| | GTCACTGGATGTGAAGTGAGGCCCTTG | |
| | (SEQ ID NO: 1062) | |
| 1063 | GTGAAGACAAGGGCCTCCAGGTTTTAGAGCTAG | 3′ pegRNA, transcription |
| | AAATAGCAAGTTAAAATAAGGCTAGTCCGTTAT | adaptation (3′TTTTTTT) |
| | CAACTTGAAAAAGTGGCACCGAGTCGGTGCCTC | |
| | GTCACTGGATGTGAAGTGAGGCCCTTGTTTTTTT | |
| | (SEQ ID NO: 1063) | |
| 1064 | GTGAAGACAAGGGCCTCCAGGTTTTAGAGCTAG | 3′ pegRNA |
| | AAATAGCAAGTTAAAATAAGGCTAGTCCGTTAT | |
| | CAACTTGAAAAAGTGGCACCGAGTCGGTGCTTG | |
| | ATGTCGTAGGTGATACCGCGAGGCCCTTG | |
| | (SEQ ID NO: 1064) | |
| 1065 | GTGAAGACAAGGGCCTCCAGGTTTTAGAGCTAG | 3′ pegRNA, transcription |
| | AAATAGCAAGTTAAAATAAGGCTAGTCCGTTAT | adaptation (3′TTTTTTT) |
| | CAACTTGAAAAAGTGGCACCGAGTCGGTGCTTG | |
| | ATGTCGTAGGTGATACCGCGAGGCCCTTGTTTTT | |
| | TT | |
| | (SEQ ID NO: 1065) | |
| 1066 | GTGAAGACAAGGGCCTCCAGGTTTTAGAGCTAG | 3′ pegRNA |
| | AAATAGCAAGTTAAAATAAGGCTAGTCCGTTAT | |
| | CAACTTGAAAAAGTGGCACCGAGTCGGTGCGGA | |
| | TCGTCCCTCAGGGGCAGGAGGCCCTTG | |
| | (SEQ ID NO: 1066) | |
| 1067 | GTGAAGACAAGGGCCTCCAGGTTTTAGAGCTAG | 3′ pegRNA, transcription |
| | AAATAGCAAGTTAAAATAAGGCTAGTCCGTTAT | adaptation (3′TTTTTTT) |
| | CAACTTGAAAAAGTGGCACCGAGTCGGTGCGGA | |
| | TCGTCCCTCAGGGGCAGGAGGCCCTTGTTTTTTT | |
| | (SEQ ID NO: 1067) | |
| 1068 | GTGAAGACAAGGGCCTCCAGGTTTTAGAGCTAG | 3′ pegRNA |
| | AAATAGCAAGTTAAAATAAGGCTAGTCCGTTAT | |
| | CAACTTGAAAAAGTGGCACCGAGTCGGTGCTCG | |
| | TGGTCTCGGGCATCAGACCCGAGGCCCTTG | |
| | (SEQ ID NO: 1068) | |
| 1069 | GTGAAGACAAGGGCCTCCAGGTTTTAGAGCTAG | 3′ pegRNA, transcription |
| | AAATAGCAAGTTAAAATAAGGCTAGTCCGTTAT | adaptation (3′TTTTTTT) |
| | CAACTTGAAAAAGTGGCACCGAGTCGGTGCTCG | |
| | TGGTCTCGGGCATCAGACCCGAGGCCCTTGTTTT | |
| | TTT | |
| | (SEQ ID NO: 1069) | |
| 1070 | GTGAAGACAAGGGCCTCCAGGTTTTAGAGCTAG | 3′ pegRNA |
| | AAATAGCAAGTTAAAATAAGGCTAGTCCGTTAT | |
| | CAACTTGAAAAAGTGGCACCGAGTCGGTGCCCG | |
| | CACTCGGCCCGTGGGGCGAGGCCCTTG | |
| | (SEQ ID NO: 1070) | |
| 1071 | GTGAAGACAAGGGCCTCCAGGTTTTAGAGCTAG | 3′ pegRNA, transcription |
| | AAATAGCAAGTTAAAATAAGGCTAGTCCGTTAT | adaptation (3′TTTTTTT) |
| | CAACTTGAAAAAGTGGCACCGAGTCGGTGCCCG | |
| | CACTCGGCCCGTGGGGCGAGGCCCTTGTTTTTTT | |
| | (SEQ ID NO: 1071) | |
| 1072 | GTGAAGACAAGGGCCTCCAGGTTTTAGAGCTAG | 3′ pegRNA |
| | AAATAGCAAGTTAAAATAAGGCTAGTCCGTTAT | |
| | CAACTTGAAAAAGTGGCACCGAGTCGGTGCGAT | |
| | TTGATAATCTCGTATATAGAGCAGTTAGAGGCCC | |
| | TTG | |
| | (SEQ ID NO: 1072) | |
| 1073 | GTGAAGACAAGGGCCTCCAGGTTTTAGAGCTAG | 3′ pegRNA, transcription |
| | AAATAGCAAGTTAAAATAAGGCTAGTCCGTTAT | adaptation (3′TTTTTTT) |
| | CAACTTGAAAAAGTGGCACCGAGTCGGTGCGAT | |
| | TTGATAATCTCGTATATAGAGCAGTTAGAGGCCC | |
| | TTGTTTTTTT | |
| | (SEQ ID NO: 1073) | |
| 1074 | GTGAAGACAAGGGCCTCCAGGTTTTAGAGCTAG | 3′ pegRNA |
| | AAATAGCAAGTTAAAATAAGGCTAGTCCGTTAT | |
| | CAACTTGAAAAAGTGGCACCGAGTCGGTGCGTG | |
| | TCTCATGTTTCCTTGTATTACGTTACCGAGGCCC | |
| | TTG | |
| | (SEQ ID NO: 1074) | |
| 1075 | GTGAAGACAAGGGCCTCCAGGTTTTAGAGCTAG | 3′ pegRNA, transcription |
| | AAATAGCAAGTTAAAATAAGGCTAGTCCGTTAT | adaptation (3′TTTTTTT) |
| | CAACTTGAAAAAGTGGCACCGAGTCGGTGCGTG | |
| | TCTCATGTTTCCTTGTATTACGTTACCGAGGCCC | |
| | TTGTTTTTTT | |
| | (SEQ ID NO: 1075) | |
| 1076 | GTGAAGACAAGGGCCTCCAGGTTTTAGAGCTAG | 3′ pegRNA |
| | AAATAGCAAGTTAAAATAAGGCTAGTCCGTTAT | |
| | CAACTTGAAAAAGTGGCACCGAGTCGGTGCGTA | |
| | ATCCAAGCTCACTAGGGGCACAACTTGGAGGCC | |
| | CTTG | |
| | (SEQ ID NO: 1076) | |
| 1077 | GTGAAGACAAGGGCCTCCAGGTTTTAGAGCTAG | 3′ pegRNA, transcription |
| | AAATAGCAAGTTAAAATAAGGCTAGTCCGTTAT | adaptation (3′TTTTTTT) |
| | CAACTTGAAAAAGTGGCACCGAGTCGGTGCGTA | |
| | ATCCAAGCTCACTAGGGGCACAACTTGGAGGCC | |
| | CTTGTTTTTTT | |
| | (SEQ ID NO: 1077) | |
| 1078 | GTGAAGACAAGGGCCTCCAGGTTTTAGAGCTAG | 3′ pegRNA |
| | AAATAGCAAGTTAAAATAAGGCTAGTCCGTTAT | |
| | CAACTTGAAAAAGTGGCACCGAGTCGGTGCCTA | |
| | TCATGCATGGCGATCCCAGGTTCGCGCGAGGCC | |
| | CTTG | |
| | (SEQ ID NO: 1078) | |
| 1079 | GTGAAGACAAGGGCCTCCAGGTTTTAGAGCTAG | 3′ pegRNA, transcription |
| | AAATAGCAAGTTAAAATAAGGCTAGTCCGTTAT | adaptation (3′TTTTTTT) |
| | CAACTTGAAAAAGTGGCACCGAGTCGGTGCCTA | |
| | TCATGCATGGCGATCCCAGGTTCGCGCGAGGCC | |
| | CTTGTTTTTTT | |
| | (SEQ ID NO: 1079) | |
| 1080 | GTGAAGACAAGGGCCTCCAGGTTTTAGAGCTAG | 3′ pegRNA |
| | AAATAGCAAGTTAAAATAAGGCTAGTCCGTTAT | |
| | CAACTTGAAAAAGTGGCACCGAGTCGGTGCGGC | |
| | TTGTCGACGACGGCGGTCTCCGTCGTCAGGATCA | |
| | TGAGGCCCTTG | |
| | (SEQ ID NO: 1080) | |
| 1081 | GTGAAGACAAGGGCCTCCAGGTTTTAGAGCTAG | 3′ pegRNA, transcription |
| | AAATAGCAAGTTAAAATAAGGCTAGTCCGTTAT | adaptation (3′TTTTTTT) |
| | CAACTTGAAAAAGTGGCACCGAGTCGGTGCGGC | |
| | TTGTCGACGACGGCGGTCTCCGTCGTCAGGATCA | |
| | TGAGGCCCTTGTTTTTTT | |
| | (SEQ ID NO: 1081) | |
| 1082 | GTGAAGACAAGGGCCTCCAGGTTTTAGAGCTAG | 3′ pegRNA |
| | AAATAGCAAGTTAAAATAAGGCTAGTCCGTTAT | |
| | CAACTTGAAAAAGTGGCACCGAGTCGGTGCAAA | |
| | TATCTGACCCAGTTACGGAGGCCCTTGT | |
| | (SEQ ID NO: 1082) | |
| 1083 | GTGAAGACAAGGGCCTCCAGGTTTTAGAGCTAG | 3′ pegRNA, transcription |
| | AAATAGCAAGTTAAAATAAGGCTAGTCCGTTAT | adaptation (3′TTTTTTT) |
| | CAACTTGAAAAAGTGGCACCGAGTCGGTGCAAA | |
| | TATCTGACCCAGTTACGGAGGCCCTTGTTTTTTT | |
| | T | |
| | (SEQ ID NO: 1083) | |
| 1084 | GTGAAGACAAGGGCCTCCAGGTTTTAGAGCTAG | 3′ pegRNA |
| | AAATAGCAAGTTAAAATAAGGCTAGTCCGTTAT | |
| | CAACTTGAAAAAGTGGCACCGAGTCGGTGCAAA | |
| | TATCTGACCCAGTTACGGAGGCCCTTGTCT | |
| | (SEQ ID NO: 1084) | |
| 1085 | GTGAAGACAAGGGCCTCCAGGTTTTAGAGCTAG | 3′ pegRNA, transcription |
| | AAATAGCAAGTTAAAATAAGGCTAGTCCGTTAT | adaptation (3′TTTTTTT) |
| | CAACTTGAAAAAGTGGCACCGAGTCGGTGCAAA | |
| | TATCTGACCCAGTTACGGAGGCCCTTGTCTTTTT | |
| | TTT | |
| | (SEQ ID NO: 1085) | |
| 1086 | GTGAAGACAAGGGCCTCCAGGTTTTAGAGCTAG | 3′ pegRNA |
| | AAATAGCAAGTTAAAATAAGGCTAGTCCGTTAT | |
| | CAACTTGAAAAAGTGGCACCGAGTCGGTGCCAA | |
| | AGAAATATCTGACCCAGTTACGGAGGCCCTTGT | |
| | (SEQ ID NO: 1086) | |
| 1087 | GTGAAGACAAGGGCCTCCAGGTTTTAGAGCTAG | 3′ pegRNA, transcription |
| | AAATAGCAAGTTAAAATAAGGCTAGTCCGTTAT | adaptation (3′TTTTTTT) |
| | CAACTTGAAAAAGTGGCACCGAGTCGGTGCCAA | |
| | AGAAATATCTGACCCAGTTACGGAGGCCCTTGTT | |
| | TTTTTT | |
| | (SEQ ID NO: 1087) | |
| 1088 | GTGAAGACAAGGGCCTCCAGGTTTTAGAGCTAG | 3′ pegRNA |
| | AAATAGCAAGTTAAAATAAGGCTAGTCCGTTAT | |
| | CAACTTGAAAAAGTGGCACCGAGTCGGTGCCAA | |
| | AGAAATATCTGACCCAGTTACGGAGGCCCTTGT | |
| | CT | |
| | (SEQ ID NO: 1088) | |
| 1089 | GTGAAGACAAGGGCCTCCAGGTTTTAGAGCTAG | 3′ pegRNA, transcription |
| | AAATAGCAAGTTAAAATAAGGCTAGTCCGTTAT | adaptation (3′TTTTTTT) |
| | CAACTTGAAAAAGTGGCACCGAGTCGGTGCCAA | |
| | AGAAATATCTGACCCAGTTACGGAGGCCCTTGT | |
| | CTTTTTTTT | |
| | (SEQ ID NO: 1089) | |
| 1090 | GTGAAGACAAGGGCCTCCAGGTTTTAGAGCTAG | 3′ pegRNA |
| | AAATAGCAAGTTAAAATAAGGCTAGTCCGTTAT | |
| | CAACTTGAAAAAGTGGCACCGAGTCGGTGCGGG | |
| | TACAAAGAAATATCTGACCCAGTTACGGAGGCC | |
| | CTTGT | |
| | (SEQ ID NO: 1090) | |
| 1091 | GTGAAGACAAGGGCCTCCAGGTTTTAGAGCTAG | 3′ pegRNA, transcription |
| | AAATAGCAAGTTAAAATAAGGCTAGTCCGTTAT | adaptation (3′TTTTTTT) |
| | CAACTTGAAAAAGTGGCACCGAGTCGGTGCGGG | |
| | TACAAAGAAATATCTGACCCAGTTACGGAGGCC | |
| | CTTGTTTTTTTT | |
| | (SEQ ID NO: 1091) | |
| 1092 | GTGAAGACAAGGGCCTCCAGGTTTTAGAGCTAG | 3′ pegRNA |
| | AAATAGCAAGTTAAAATAAGGCTAGTCCGTTAT | |
| | CAACTTGAAAAAGTGGCACCGAGTCGGTGCGGG | |
| | TACAAAGAAATATCTGACCCAGTTACGGAGGCC | |
| | CTTGTCT | |
| | (SEQ ID NO: 1092) | |
| 1093 | GTGAAGACAAGGGCCTCCAGGTTTTAGAGCTAG | 3′ pegRNA, transcription |
| | AAATAGCAAGTTAAAATAAGGCTAGTCCGTTAT | adaptation (3′TTTTTTT) |
| | CAACTTGAAAAAGTGGCACCGAGTCGGTGCGGG | |
| | TACAAAGAAATATCTGACCCAGTTACGGAGGCC | |
| | CTTGTCTTTTTTTT | |
| | (SEQ ID NO: 1093) | |
| 1094 | GTGAAGACAAGGGCCTCCAGGTTTTAGAGCTAG | 3′ pegRNA |
| | AAATAGCAAGTTAAAATAAGGCTAGTCCGTTAT | |
| | CAACTTGAAAAAGTGGCACCGAGTCGGTGCATG | |
| | ATCCTGACGACGGAGACCGCCGTCGTCGACAAG | |
| | CCGAGGCCCT | |
| | (SEQ ID NO: 1094) | |
| 1095 | GTGAAGACAAGGGCCTCCAGGTTTTAGAGCTAG | 3′ pegRNA, transcription |
| | AAATAGCAAGTTAAAATAAGGCTAGTCCGTTAT | adaptation (3′TTTTTTT) |
| | CAACTTGAAAAAGTGGCACCGAGTCGGTGCATG | |
| | ATCCTGACGACGGAGACCGCCGTCGTCGACAAG | |
| | CCGAGGCCCTTTTTTTT | |
| | (SEQ ID NO: 1095) | |
| 1096 | GTGAAGACAAGGGCCTCCAGGTTTTAGAGCTAG | 3′ pegRNA |
| | AAATAGCAAGTTAAAATAAGGCTAGTCCGTTAT | |
| | CAACTTGAAAAAGTGGCACCGAGTCGGTGCATG | |
| | ATCCTGACGACGGAGACCGCCGTCGTCGACAAG | |
| | CCGAGGCCCTT | |
| | (SEQ ID NO: 1096) | |
| 1097 | GTGAAGACAAGGGCCTCCAGGTTTTAGAGCTAG | 3′ pegRNA, transcription |
| | AAATAGCAAGTTAAAATAAGGCTAGTCCGTTAT | adaptation (3′TTTTTTT) |
| | CAACTTGAAAAAGTGGCACCGAGTCGGTGCATG | |
| | ATCCTGACGACGGAGACCGCCGTCGTCGACAAG | |
| | CCGAGGCCCTTTTTTTTT | |
| | (SEQ ID NO: 1097) | |
| 1098 | GTGAAGACAAGGGCCTCCAGGTTTTAGAGCTAG | 3′ pegRNA, transcription |
| | AAATAGCAAGTTAAAATAAGGCTAGTCCGTTAT | adaptation (3′TTTTTTT) |
| | CAACTTGAAAAAGTGGCACCGAGTCGGTGCATG | |
| | ATCCTGACGACGGAGACCGCCGTCGTCGACAAG | |
| | CCGAGGCCCTTGTTTTTTT | |
| | (SEQ ID NO: 1098) | |
| 1099 | GTGAAGACAAGGGCCTCCAGGTTTTAGAGCTAG | 3′ pegRNA |
| | AAATAGCAAGTTAAAATAAGGCTAGTCCGTTAT | |
| | CAACTTGAAAAAGTGGCACCGAGTCGGTGCATG | |
| | ATCCTGACGACGGAGACCGCCGTCGTCGACAAG | |
| | CCGAGGCCCTTGT | |
| | (SEQ ID NO: 1099) | |
| 1100 | GTGAAGACAAGGGCCTCCAGGTTTTAGAGCTAG | 3′ pegRNA, transcription |
| | AAATAGCAAGTTAAAATAAGGCTAGTCCGTTAT | adaptation (3′TTTTTTT) |
| | CAACTTGAAAAAGTGGCACCGAGTCGGTGCATG | |
| | ATCCTGACGACGGAGACCGCCGTCGTCGACAAG | |
| | CCGAGGCCCTTGTTTTTTTT | |
| | (SEQ ID NO: 1100) | |
| 1101 | GTGAAGACAAGGGCCTCCAGGTTTTAGAGCTAG | 3′ pegRNA, transcription |
| | AAATAGCAAGTTAAAATAAGGCTAGTCCGTTAT | adaptation (3′TTTTTTT) |
| | CAACTTGAAAAAGTGGCACCGAGTCGGTGCATG | |
| | ATCCTGACGACGGAGACCGCCGTCGTCGACAAG | |
| | CCGAGGCCCTTGTCTTTTTTT | |
| | (SEQ ID NO: 1101) | |
| 1102 | GTGAAGACAAGGGCCTCCAGGTTTTAGAGCTAG | 3′ pegRNA |
| | AAATAGCAAGTTAAAATAAGGCTAGTCCGTTAT | |
| | CAACTTGAAAAAGTGGCACCGAGTCGGTGCATG | |
| | ATCCTGACGACGGAGACCGCCGTCGTCGACAAG | |
| | CCGAGGCCCTTGTCT | |
| | (SEQ ID NO: 1102) | |
| 1103 | GTGAAGACAAGGGCCTCCAGGTTTTAGAGCTAG | 3′ pegRNA, transcription |
| | AAATAGCAAGTTAAAATAAGGCTAGTCCGTTAT | adaptation (3′TTTTTTT) |
| | CAACTTGAAAAAGTGGCACCGAGTCGGTGCATG | |
| | ATCCTGACGACGGAGACCGCCGTCGTCGACAAG | |
| | CCGAGGCCCTTGTCTTTTTTTT | |
| | (SEQ ID NO: 1103) | |
| 1104 | GTGAAGACAAGGGCCTCCAGGTTTTAGAGCTAG | 3′ pegRNA |
| | AAATAGCAAGTTAAAATAAGGCTAGTCCGTTAT | |
| | CAACTTGAAAAAGTGGCACCGAGTCGGTGCATG | |
| | ATCCTGACGACGGAGACCGCCGTCGTCGACAAG | |
| | CCGAGGCCCTTGTCTT | |
| | (SEQ ID NO: 1104) | |
| 1105 | GTGAAGACAAGGGCCTCCAGGTTTTAGAGCTAG | 3′ pegRNA, transcription |
| | AAATAGCAAGTTAAAATAAGGCTAGTCCGTTAT | adaptation (3′TTTTTTT) |
| | CAACTTGAAAAAGTGGCACCGAGTCGGTGCATG | |
| | ATCCTGACGACGGAGACCGCCGTCGTCGACAAG | |
| | CCGAGGCCCTTGTCTTTTTTTTT | |
| | (SEQ ID NO: 1105) | |
| 1106 | GTGAAGACAAGGGCCTCCAGGTTTTAGAGCTAG | 3′ pegRNA |
| | AAATAGCAAGTTAAAATAAGGCTAGTCCGTTAT | |
| | CAACTTGAAAAAGTGGCACCGAGTCGGTGCATG | |
| | ATCCTGACGACGGAGACCGCCGTCGTCGACAAG | |
| | CCGAGGCCCTTGTCTTC | |
| | (SEQ ID NO: 1106) | |
| 1107 | GTGAAGACAAGGGCCTCCAGGTTTTAGAGCTAG | 3′ pegRNA, transcription |
| | AAATAGCAAGTTAAAATAAGGCTAGTCCGTTAT | adaptation (3′TTTTTTT) |
| | CAACTTGAAAAAGTGGCACCGAGTCGGTGCATG | |
| | ATCCTGACGACGGAGACCGCCGTCGTCGACAAG | |
| | CCGAGGCCCTTGTCTTCTTTTTTT | |
| | (SEQ ID NO: 1107) | |
| 1108 | GTGAAGACAAGGGCCTCCAGGTTTTAGAGCTAG | 3′ pegRNA |
| | AAATAGCAAGTTAAAATAAGGCTAGTCCGTTAT | |
| | CAACTTGAAAAAGTGGCACCGAGTCGGTGCATG | |
| | ATCCTGACGACGGAGACCGCCGTCGTCGACAAG | |
| | CCGAGGCCCTTGTCTTCA | |
| | (SEQ ID NO: 1108) | |
| 1109 | GTGAAGACAAGGGCCTCCAGGTTTTAGAGCTAG | 3′ pegRNA, transcription |
| | AAATAGCAAGTTAAAATAAGGCTAGTCCGTTAT | adaptation (3′TTTTTTT) |
| | CAACTTGAAAAAGTGGCACCGAGTCGGTGCATG | |
| | ATCCTGACGACGGAGACCGCCGTCGTCGACAAG | |
| | CCGAGGCCCTTGTCTTCATTTTTTT | |
| | (SEQ ID NO: 1109) | |
| 1110 | GTGAAGACAAGGGCCTCCAGGTTTTAGAGCTAG | 3′ pegRNA |
| | AAATAGCAAGTTAAAATAAGGCTAGTCCGTTAT | |
| | CAACTTGAAAAAGTGGCACCGAGTCGGTGCATG | |
| | ATCCTGACGACGGAGACCGCCGTCGTCGACAAG | |
| | CCGAGGCCCTTGTCTTCAC | |
| | (SEQ ID NO: 1110) | |
| 1111 | GTGAAGACAAGGGCCTCCAGGTTTTAGAGCTAG | 3′ pegRNA, transcription |
| | AAATAGCAAGTTAAAATAAGGCTAGTCCGTTAT | adaptation (3′TTTTTTT) |
| | CAACTTGAAAAAGTGGCACCGAGTCGGTGCATG | |
| | ATCCTGACGACGGAGACCGCCGTCGTCGACAAG | |
| | CCGAGGCCCTTGTCTTCACTTTTTTT | |
| | (SEQ ID NO: 1111) | |
| 1112 | GTGAAGACAAGGGCCTCCAGGTTTAAGAGCGGG | 3′ pegRNA, gRNA core |
| | GAAATCCGCAAGTTTAAATAAGGCTAGTCCGTT | SEQ ID NO: 2259 |
| | ATCAGCGTGAAAACGCGGCACCGAGTCGGTGCA | |
| | TGATCCTGACGACGGAGACCGCCGTCGTCGACA | |
| | AGCCGAGGCCCTTGT | |
| | (SEQ ID NO: 1112) | |
| 1113 | GTGAAGACAAGGGCCTCCAGGTTTAAGAGCGGG | 3′ pegRNA, transcription |
| | GAAATCCGCAAGTTTAAATAAGGCTAGTCCGTT | adaptation (3′TTTTTTT), |
| | ATCAGCGTGAAAACGCGGCACCGAGTCGGTGCA | gRNA core SEQ ID NO: |
| | TGATCCTGACGACGGAGACCGCCGTCGTCGACA | 2259 |
| | AGCCGAGGCCCTTGTTTTTTTT | |
| | (SEQ ID NO: 1113) | |
| 1114 | GTGAAGACAAGGGCCTCCAGGTTTTAGAGCTAG | 3′ pegRNA, linker sequence |
| | AAATAGCAAGTTAAAATAAGGCTAGTCCGTTAT | number 2249, 3′ motif SEQ |
| | CAACTTGAAAAAGTGGCACCGAGTCGGTGCATG | ID NO: 2237 |
| | ATCCTGACGACGGAGACCGCCGTCGTCGACAAG | |
| | CCGAGGCCCTTGTAAGATCCGCGGTTCTATCTAG | |
| | TTACGCGTTAAACCAACTAGAA | |
| | (SEQ ID NO: 1114) | |
| 1115 | GTGAAGACAAGGGCCTCCAGGTTTTAGAGCTAG | 3′ pegRNA, linker sequence |
| | AAATAGCAAGTTAAAATAAGGCTAGTCCGTTAT | number 2249, 3′ motif SEQ |
| | CAACTTGAAAAAGTGGCACCGAGTCGGTGCATG | ID NO: 2237, transcription |
| | ATCCTGACGACGGAGACCGCCGTCGTCGACAAG | adaptation (3′TTTTTTT) |
| | CCGAGGCCCTTGTAAGATCCGCGGTTCTATCTAG | |
| | TTACGCGTTAAACCAACTAGAATTTTTTT | |
| | (SEQ ID NO: 1115) | |
| 1116 | GTGAAGACAAGGGCCTCCAGGTTTTAGAGCTAG | 3′ pegRNA, linker sequence |
| | AAATAGCAAGTTAAAATAAGGCTAGTCCGTTAT | number 2255, 3′ motif SEQ |
| | CAACTTGAAAAAGTGGCACCGAGTCGGTGCATG | ID NO: 2237 |
| | ATCCTGACGACGGAGACCGCCGTCGTCGACAAG | |
| | CCGAGGCCCTTGTAAAATCCGCGGTTCTATCTAG | |
| | TTACGCGTTAAACCAACTAGAA | |
| | (SEQ ID NO: 1116) | |
| 1117 | GTGAAGACAAGGGCCTCCAGGTTTTAGAGCTAG | 3′ pegRNA, linker sequence |
| | AAATAGCAAGTTAAAATAAGGCTAGTCCGTTAT | number 2255, 3′ motif SEQ |
| | CAACTTGAAAAAGTGGCACCGAGTCGGTGCATG | ID NO: 2237, transcription |
| | ATCCTGACGACGGAGACCGCCGTCGTCGACAAG | adaptation (3′TTTTTTT) |
| | CCGAGGCCCTTGTAAAATCCGCGGTTCTATCTAG | |
| | TTACGCGTTAAACCAACTAGAATTTTTTT | |
| | (SEQ ID NO: 1117) | |
| 1118 | GTGAAGACAAGGGCCTCCAGGTTTAAGAGCGGG | 3′ pegRNA, linker sequence |
| | GAAATCCGCAAGTTTAAATAAGGCTAGTCCGTT | number 2254, 3′ motif SEQ |
| | ATCAGCGTGAAAACGCGGCACCGAGTCGGTGCA | ID NO: 2237, gRNA core |
| | TGATCCTGACGACGGAGACCGCCGTCGTCGACA | SEQ ID NO: 2259 |
| | AGCCGAGGCCCTTGTATTGTCCGCGGTTCTATCT | |
| | AGTTACGCGTTAAACCAACTAGAA | |
| | (SEQ ID NO: 1118) | |
| 1119 | GTGAAGACAAGGGCCTCCAGGTTTAAGAGCGGG | 3′ pegRNA, 3′ motif SEQ |
| | GAAATCCGCAAGTTTAAATAAGGCTAGTCCGTT | ID NO: 2254, transcription |
| | ATCAGCGTGAAAACGCGGCACCGAGTCGGTGCA | adaptation (3′TTTTTTT), |
| | TGATCCTGACGACGGAGACCGCCGTCGTCGACA | gRNA core SEQ ID NO: |
| | AGCCGAGGCCCTTGTATTGTCCGCGGTTCTATCT | 2259 |
| | AGTTACGCGTTAAACCAACTAGAATTTTTTT | |
| | (SEQ ID NO: 1119) | |
| 1120 | GTGAAGACAAGGGCCTCCAGGTTTAAGAGCGGG | 3′ pegRNA, linker sequence |
| | GAAATCCGCAAGTTTAAATAAGGCTAGTCCGTT | number 2239, 3′ motif SEQ |
| | ATCAGCGTGAAAACGCGGCACCGAGTCGGTGCA | ID NO: 2237, gRNA core |
| | TGATCCTGACGACGGAGACCGCCGTCGTCGACA | SEQ ID NO: 2259 |
| | AGCCGAGGCCCTTGTAATATCCGCGGTTCTATCT | |
| | AGTTACGCGTTAAACCAACTAGAA | |
| | (SEQ ID NO: 1120) | |
| 1121 | GTGAAGACAAGGGCCTCCAGGTTTAAGAGCGGG | 3′ pegRNA, linker sequence |
| | GAAATCCGCAAGTTTAAATAAGGCTAGTCCGTT | number 2239, 3′ motif SEQ |
| | ATCAGCGTGAAAACGCGGCACCGAGTCGGTGCA | ID NO: 2237, transcription |
| | TGATCCTGACGACGGAGACCGCCGTCGTCGACA | adaptation (3′TTTTTTT), |
| | AGCCGAGGCCCTTGTAATATCCGCGGTTCTATCT | gRNA core SEQ ID NO: |
| | AGTTACGCGTTAAACCAACTAGAATTTTTTT | 2259 |
| | (SEQ ID NO: 1121) | |
| 1122 | GTGAAGACAAGGGCCTCCAGGTATAAGAGCGGG | 3′ pegRNA, gRNA core |
| | GAAATCCGCAAGTTTATATAAGACTAGTTCGTTA | SEQ ID NO: 2271 |
| | TCAGCGTGAAAACGCGGCACCGAGTCGGTGCAT | |
| | GATCCTGACGACGGAGACCGCCGTCGTCGACAA | |
| | GCCGAGGCCCTTGT | |
| | (SEQ ID NO: 1122) | |
| 1123 | GTGAAGACAAGGGCCTCCAGGTATAAGAGCGGG | 3′ pegRNA, transcription |
| | GAAATCCGCAAGTTTATATAAGACTAGTTCGTTA | adaptation (3′TTTTTTT), |
| | TCAGCGTGAAAACGCGGCACCGAGTCGGTGCAT | gRNA core SEQ ID NO: |
| | GATCCTGACGACGGAGACCGCCGTCGTCGACAA | 2271 |
| | GCCGAGGCCCTTGTTTTTTTT | |
| | (SEQ ID NO: 1123) | |
| 1124 | GTGAAGACAAGGGCCTCCAGGTATAAGAGCGGG | 3′ pegRNA, gRNA core |
| | GAAATCCGCATGTTTATATAAGACTAGTTCGTTA | SEQ ID NO: 2269 |
| | CCAGCGTGAAAACGCGGCACCGAGTCGGTGCAT | |
| | GATCCTGACGACGGAGACCGCCGTCGTCGACAA | |
| | GCCGAGGCCCTTGT | |
| | (SEQ ID NO: 1124) | |
| 1125 | GTGAAGACAAGGGCCTCCAGGTATAAGAGCGGG | 3′ pegRNA, transcription |
| | GAAATCCGCATGTTTATATAAGACTAGTTCGTTA | adaptation (3′TTTTTTT), |
| | CCAGCGTGAAAACGCGGCACCGAGTCGGTGCAT | gRNA core SEQ ID NO: |
| | GATCCTGACGACGGAGACCGCCGTCGTCGACAA | 2269 |
| | GCCGAGGCCCTTGTTTTTTTT | |
| | (SEQ ID NO: 1125) | |
| 1128 | GTGAAGACAAGGGCCTCCAGGTTTTAGAGCTAG | 3′ pegRNA, transcription |
| | AAATAGCAAGTTAAAATAAGGCTAGTCCGTTAT | adaptation (3′TTTT) |
| | CAACTTGAAAAAGTGGCACCGAGTCGGTGCATG | |
| | ATCCTGACGACGGAGACCGCCGTCGTCGACAAG | |
| | CCGAGGCCCTTGTCATTTT | |
| | (SEQ ID NO: 1128) | |
| 1129 | GTGAAGACAAGGGCCTCCAGGTTTTAGAGCTAG | 3′ pegRNA |
| | AAATAGCAAGTTAAAATAAGGCTAGTCCGTTAT | |
| | CAACTTGAAAAAGTGGCACCGAGTCGGTGCATG | |
| | ATCCTGACGACGGAGACCGCCGTCGTCGACAAG | |
| | CCGAGGCCCTTGTCA | |
| | (SEQ ID NO: 1129) | |
| 1130 | GTGAAGACAAGGGCCTCCAGGTTTTAGAGCTAG | 3′ pegRNA, transcription |
| | AAATAGCAAGTTAAAATAAGGCTAGTCCGTTAT | adaptation (3′TTTT) |
| | CAACTTGAAAAAGTGGCACCGAGTCGGTGCATG | |
| | ATCCTGACGACGGAGACCGCCGTCGTCGACAAG | |
| | CCGAGGCCCTTGATTTT | |
| | (SEQ ID NO: 1130) | |
| 1131 | GTGAAGACAAGGGCCTCCAGGTTTTAGAGCTAG | 3′ pegRNA |
| | AAATAGCAAGTTAAAATAAGGCTAGTCCGTTAT | |
| | CAACTTGAAAAAGTGGCACCGAGTCGGTGCATG | |
| | ATCCTGACGACGGAGACCGCCGTCGTCGACAAG | |
| | CCGAGGCCCTTGA | |
| | (SEQ ID NO: 1131) | |
| 2549 | GTGAAGACAAGGGCCTCCAGGTTTTAGAGCTAG | 3′ pegRNA |
| | AAATAGCAAGTTAAAATAAGGCTAGTCCGTTAT | |
| | CAACTTGAAAAAGTGGCACCGAGTCGGTGCGTT | |
| | GAAGGAGTCAGTAGGGGCGGCAAATCTCAAAGA | |
| | GTGTGGCCCAGTGCTGAAAGTAGCGGAGGCCCT | |
| | TGT | |
| | (SEQ ID NO: 2549) | |
| 2550 | GTGAAGACAAGGGCCTCCAGGTTTTAGAGCTAG | 3′ pegRNA |
| | AAATAGCAAGTTAAAATAAGGCTAGTCCGTTAT | |
| | CAACTTGAAAAAGTGGCACCGAGTCGGTGCAGG | |
| | AGTCAGTAGGGGCGGCAAATCTCAAAGAGTGTG | |
| | GCCCAGTGCTGAAAGTAGCGGAGGCCCTTGT | |
| | (SEQ ID NO: 2550) | |
| 2551 | GTGAAGACAAGGGCCTCCAGGTTTTAGAGCTAG | 3′ pegRNA |
| | AAATAGCAAGTTAAAATAAGGCTAGTCCGTTAT | |
| | CAACTTGAAAAAGTGGCACCGAGTCGGTGCAGT | |
| | AGGGGCGGCAAATCTCAAAGAGTGTGGCCCAGT | |
| | GCTGAAAGTAGCGGAGGCCCTTGT | |
| | (SEQ ID NO: 2551) | |
| 2552 | GTGAAGACAAGGGCCTCCAGGTTTTAGAGCTAG | 3′ pegRNA |
| | AAATAGCAAGTTAAAATAAGGCTAGTCCGTTAT | |
| | CAACTTGAAAAAGTGGCACCGAGTCGGTGCGGG | |
| | GCGGCAAATCTCAAAGAGTGTGGCCCAGTGCTG | |
| | AAAGTAGCGGAGGCCCTTGT | |
| | (SEQ ID NO: 2552) | |
| 2553 | GTGAAGACAAGGGCCTCCAGGTTTTAGAGCTAG | 3′ pegRNA |
| | AAATAGCAAGTTAAAATAAGGCTAGTCCGTTAT | |
| | CAACTTGAAAAAGTGGCACCGAGTCGGTGCAAA | |
| | TCTCAAAGAGTGTGGCCCAGTGCTGAAAGTAGC | |
| | GGAGGCCCTTGT | |
| | (SEQ ID NO: 2553) | |
| 2554 | GTGAAGACAAGGGCCTCCAGGTTTTAGAGCTAG | 3′ pegRNA |
| | AAATAGCAAGTTAAAATAAGGCTAGTCCGTTAT | |
| | CAACTTGAAAAAGTGGCACCGAGTCGGTGCTCA | |
| | AAGAGTGTGGCCCAGTGCTGAAAGTAGCGGAGG | |
| | CCCTTGT | |
| | (SEQ ID NO: 2554) | |
| 2555 | GTGAAGACAAGGGCCTCCAGGTTTTAGAGCTAG | 3′ pegRNA |
| | AAATAGCAAGTTAAAATAAGGCTAGTCCGTTAT | |
| | CAACTTGAAAAAGTGGCACCGAGTCGGTGCGTT | |
| | GAAGGAGTCAGTAGGGGCGGCAAATCTCAAAGA | |
| | GTGTGGCCCAGTGCTGAAAGTAGCGGAGGCCCT | |
| | TGTCT | |
| | (SEQ ID NO: 2555) | |
| 2556 | GTGAAGACAAGGGCCTCCAGGTTTTAGAGCTAG | 3′ pegRNA |
| | AAATAGCAAGTTAAAATAAGGCTAGTCCGTTAT | |
| | CAACTTGAAAAAGTGGCACCGAGTCGGTGCAGG | |
| | AGTCAGTAGGGGCGGCAAATCTCAAAGAGTGTG | |
| | GCCCAGTGCTGAAAGTAGCGGAGGCCCTTGTCT | |
| | (SEQ ID NO: 2556) | |
| 2557 | GTGAAGACAAGGGCCTCCAGGTTTTAGAGCTAG | 3′ pegRNA |
| | AAATAGCAAGTTAAAATAAGGCTAGTCCGTTAT | |
| | CAACTTGAAAAAGTGGCACCGAGTCGGTGCAGT | |
| | AGGGGCGGCAAATCTCAAAGAGTGTGGCCCAGT | |
| | GCTGAAAGTAGCGGAGGCCCTTGTCT | |
| | (SEQ ID NO: 2557) | |
| 2558 | GTGAAGACAAGGGCCTCCAGGTTTTAGAGCTAG | 3′ pegRNA |
| | AAATAGCAAGTTAAAATAAGGCTAGTCCGTTAT | |
| | CAACTTGAAAAAGTGGCACCGAGTCGGTGCGGG | |
| | GCGGCAAATCTCAAAGAGTGTGGCCCAGTGCTG | |
| | AAAGTAGCGGAGGCCCTTGTCT | |
| | (SEQ ID NO: 2558) | |
| 2559 | GTGAAGACAAGGGCCTCCAGGTTTTAGAGCTAG | 3′ pegRNA |
| | AAATAGCAAGTTAAAATAAGGCTAGTCCGTTAT | |
| | CAACTTGAAAAAGTGGCACCGAGTCGGTGCAAA | |
| | TCTCAAAGAGTGTGGCCCAGTGCTGAAAGTAGC | |
| | GGAGGCCCTTGTCT | |
| | (SEQ ID NO: 2559) | |
| 2560 | GTGAAGACAAGGGCCTCCAGGTTTTAGAGCTAG | 3′ pegRNA |
| | AAATAGCAAGTTAAAATAAGGCTAGTCCGTTAT | |
| | CAACTTGAAAAAGTGGCACCGAGTCGGTGCTCA | |
| | AAGAGTGTGGCCCAGTGCTGAAAGTAGCGGAGG | |
| | CCCTTGTCT | |
| | (SEQ ID NO: 2560) | |

TABLE 26
Exemplary 3′ PEgRNA and component sequence

| Sequence | | |
|---|---|---|
| number | Sequence | Description |
| 1132 | GATTGGGGGAGATACAGAGG (SEQ ID NO: 1132) | 3′ Spacer |
| 1133 | TGGGGGAGATACAGAGG (SEQ ID NO: 1133) | 3′ Spacer |
| 1134 | TTGGGGGAGATACAGAGG (SEQ ID NO: 1134) | 3′ Spacer |
| 1135 | ATTGGGGGAGATACAGAGG (SEQ ID NO: 1135) | 3′ Spacer |
| 1136 | GGATTGGGGGAGATACAGAGG (SEQ ID NO: 1136) | 3′ Spacer |
| 1137 | TGGATTGGGGGAGATACAGAGG (SEQ ID NO: | 3′ Spacer |
| | 1137) | |
| 1138 | CTGTA | 3′ PBS |
| 1139 | CTGTAT | 3′ PBS |
| 1140 | CTGTATC | 3′ PBS |
| 1141 | CTGTATCT | 3′ PBS |
| 1142 | CTGTATCTC | 3′ PBS |
| 1143 | CTGTATCTCC (SEQ ID NO: 1143) | 3′ PBS |
| 1144 | CTGTATCTCCC (SEQ ID NO: 1144) | 3′ PBS |
| 1145 | CTGTATCTCCCC (SEQ ID NO: 1145) | 3′ PBS |
| 1146 | CTGTATCTCCCCC (SEQ ID NO: 1146) | 3′ PBS |
| 1147 | CTGTATCTCCCCCA (SEQ ID NO: 1147) | 3′ PBS |
| 1148 | CTGTATCTCCCCCAA (SEQ ID NO: 1148) | 3′ PBS |
| 1149 | CTGTATCTCCCCCAAT (SEQ ID NO: 1149) | 3′ PBS |
| 1150 | CTGTATCTCCCCCAATC (SEQ ID NO: 1150) | 3′ PBS |
| 1151 | CTGTATCTCCCCCAATCC (SEQ ID NO: 1151) | 3′ PBS |
| 1152 | CTGTATCTCCCCCAATCCA (SEQ ID NO: 1152) | 3′ PBS |
| 1153 | GATTGGGGGAGATACAGAGGGTTTTAGAGCTAG | 3′ pegRNA |
| | AAATAGCAAGTTAAAATAAGGCTAGTCCGTTAT | |
| | CAACTTGAAAAAGTGGCACCGAGTCGGTGCATG | |
| | ATCCTGACGACGGAGACCGCCGTCGTCGACAAG | |
| | CCCTGTATCTCCCC (SEQ ID NO: 1153) | |
| 1154 | GATTGGGGGAGATACAGAGGGTTTTAGAGCTAG | 3′ pegRNA, transcription |
| | AAATAGCAAGTTAAAATAAGGCTAGTCCGTTAT | adaptation (3′TTTTTTT) |
| | CAACTTGAAAAAGTGGCACCGAGTCGGTGCATG | |
| | ATCCTGACGACGGAGACCGCCGTCGTCGACAAG | |
| | CCCTGTATCTCCCCTTTTTTT (SEQ ID NO: 1154) | |
| 1155 | GATTGGGGGAGATACAGAGGGTTTTAGAGCTAG | 3′ pegRNA |
| | AAATAGCAAGTTAAAATAAGGCTAGTCCGTTAT | |
| | CAACTTGAAAAAGTGGCACCGAGTCGGTGCATG | |
| | ATCCTGACGACGGAGACCGCCGTCGTCGACAAG | |
| | CCCTGTATCTCC (SEQ ID NO: 1155) | |
| 1156 | GATTGGGGGAGATACAGAGGGTTTTAGAGCTAG | 3′ pegRNA, transcription |
| | AAATAGCAAGTTAAAATAAGGCTAGTCCGTTAT | adaptation (3′TTTTTTT) |
| | CAACTTGAAAAAGTGGCACCGAGTCGGTGCATG | |
| | ATCCTGACGACGGAGACCGCCGTCGTCGACAAG | |
| | CCCTGTATCTCCTTTTTTT (SEQ ID NO: 1156) | |
| 1157 | GATTGGGGGAGATACAGAGGGTTTTAGAGCTAG | 3′ pegRNA, transcription |
| | AAATAGCAAGTTAAAATAAGGCTAGTCCGTTAT | adaptation (3′TTTT) |
| | CAACTTGAAAAAGTGGCACCGAGTCGGTGCATG | |
| | ATCCTGACGACGGAGACCGCCGTCGTCGACAAG | |
| | CCCTGTATCTCCCCTTTT (SEQ ID NO: 1157) | |
| 1158 | GATTGGGGGAGATACAGAGGGTTTTAGAGCTAG | 3′ pegRNA, transcription |
| | AAATAGCAAGTTAAAATAAGGCTAGTCCGTTAT | adaptation (3′TTTT) |
| | CAACTTGAAAAAGTGGCACCGAGTCGGTGCATG | |
| | ATCCTGACGACGGAGACCGCCGTCGTCGACAAG | |
| | CCCTGTATCTCCTTTT (SEQ ID NO: 1158) | |

TABLE 27
Exemplary 3′ PEgRNA and component sequence

| Sequence | | |
|---|---|---|
| number | Sequence | Description |
| 1159 | TCAGGACCCATACCTCGCAG (SEQ ID NO: 1159) | 3′ Spacer |
| 1160 | GGACCCATACCTCGCAG (SEQ ID NO: 1160) | 3′ Spacer |
| 1161 | AGGACCCATACCTCGCAG (SEQ ID NO: 1161) | 3′ Spacer |
| 1162 | CAGGACCCATACCTCGCAG (SEQ ID NO: 1162) | 3′ Spacer |
| 1163 | ATCAGGACCCATACCTCGCAG (SEQ ID NO: 1163) | 3′ Spacer |
| 1164 | AATCAGGACCCATACCTCGCAG (SEQ ID NO: | 3′ Spacer |
| | 1164) | |
| 1165 | CGAGG | 3′ PBS |
| 1166 | CGAGGT | 3′ PBS |
| 1167 | CGAGGTA | 3′ PBS |
| 1168 | CGAGGTAT | 3′ PBS |
| 1169 | CGAGGTATG | 3′ PBS |
| 1170 | CGAGGTATGG (SEQ ID NO: 1170) | 3′ PBS |
| 1171 | CGAGGTATGGG (SEQ ID NO: 1171) | 3′ PBS |
| 1172 | CGAGGTATGGGT (SEQ ID NO: 1172) | 3′ PBS |
| 1173 | CGAGGTATGGGTC (SEQ ID NO: 1173) | 3′ PBS |
| 1174 | CGAGGTATGGGTCC (SEQ ID NO: 1174) | 3′ PBS |
| 1175 | CGAGGTATGGGTCCT (SEQ ID NO: 1175) | 3′ PBS |
| 1176 | CGAGGTATGGGTCCTG (SEQ ID NO: 1176) | 3′ PBS |
| 1177 | CGAGGTATGGGTCCTGA (SEQ ID NO: 1177) | 3′ PBS |
| 1178 | CGAGGTATGGGTCCTGAT (SEQ ID NO: 1178) | 3′ PBS |
| 1179 | CGAGGTATGGGTCCTGATT (SEQ ID NO: 1179) | 3′ PBS |
| 1180 | TCAGGACCCATACCTCGCAGGTTTTAGAGCTAG | 3′ pegRNA |
| | AAATAGCAAGTTAAAATAAGGCTAGTCCGTTAT | |
| | CAACTTGAAAAAGTGGCACCGAGTCGGTGCATG | |
| | ATCCTGACGACGGAGACCGCCGTCGTCGACAAG | |
| | CCCGAGGTATGGGT (SEQ ID NO: 1180) | |
| 1181 | GTCAGGACCCATACCTCGCAGGTTTTAGAGCTA | 3′ pegRNA, transcription |
| | GAAATAGCAAGTTAAAATAAGGCTAGTCCGTTA | adaptation (5′G, |
| | TCAACTTGAAAAAGTGGCACCGAGTCGGTGCAT | 3′TTTTTTT) |
| | GATCCTGACGACGGAGACCGCCGTCGTCGACAA | |
| | GCCCGAGGTATGGGTTTTTTTT (SEQ ID NO: 1181) | |
| 1182 | TCAGGACCCATACCTCGCAGGTTTTAGAGCTAG | 3′ pegRNA |
| | AAATAGCAAGTTAAAATAAGGCTAGTCCGTTAT | |
| | CAACTTGAAAAAGTGGCACCGAGTCGGTGCATG | |
| | ATCCTGACGACGGAGACCGCCGTCGTCGACAAG | |
| | CCCGAGGTATGG (SEQ ID NO: 1182) | |
| 1183 | GTCAGGACCCATACCTCGCAGGTTTTAGAGCTA | 3′ pegRNA, transcription |
| | GAAATAGCAAGTTAAAATAAGGCTAGTCCGTTA | adaptation (5′G, |
| | TCAACTTGAAAAAGTGGCACCGAGTCGGTGCAT | 3′TTTTTTT) |
| | GATCCTGACGACGGAGACCGCCGTCGTCGACAA | |
| | GCCCGAGGTATGGTTTTTTT (SEQ ID NO: 1183) | |
| 1184 | TCAGGACCCATACCTCGCAGGTTTTAGAGCTAG | 3′ pegRNA, transcription |
| | AAATAGCAAGTTAAAATAAGGCTAGTCCGTTAT | adaptation (3′TTTT) |
| | CAACTTGAAAAAGTGGCACCGAGTCGGTGCATG | |
| | ATCCTGACGACGGAGACCGCCGTCGTCGACAAG | |
| | CCCGAGGTATGGGTTTTT (SEQ ID NO: 1184) | |
| 1185 | TCAGGACCCATACCTCGCAGGTTTTAGAGCTAG | 3′ pegRNA, transcription |
| | AAATAGCAAGTTAAAATAAGGCTAGTCCGTTAT | adaptation (3′TTTT) |
| | CAACTTGAAAAAGTGGCACCGAGTCGGTGCATG | |
| | ATCCTGACGACGGAGACCGCCGTCGTCGACAAG | |
| | CCCGAGGTATGGTTTT (SEQ ID NO: 1185) | |

TABLE 28
Exemplary 3′ PEgRNA and component sequence

| Sequence | | |
|---|---|---|
| number | Sequence | Description |
| 1186 | ACCCCAAGTACAGAGCCTGA (SEQ ID NO: 1186) | 3′ Spacer |
| 1187 | CCAAGTACAGAGCCTGA (SEQ ID NO: 1187) | 3′ Spacer |
| 1188 | CCCAAGTACAGAGCCTGA (SEQ ID NO: 1188) | 3′ Spacer |
| 1189 | CCCCAAGTACAGAGCCTGA (SEQ ID NO: 1189) | 3′ Spacer |
| 1190 | TACCCCAAGTACAGAGCCTGA (SEQ ID NO: 1190) | 3′ Spacer |
| 1191 | ATACCCCAAGTACAGAGCCTGA (SEQ ID NO: | 3′ Spacer |
| | 1191) | |
| 1192 | GGCTC | 3′ PBS |
| 1193 | GGCTCT | 3′ PBS |
| 1194 | GGCTCTG | 3′ PBS |
| 1195 | GGCTCTGT | 3′ PBS |
| 1196 | GGCTCTGTA | 3′ PBS |
| 1197 | GGCTCTGTAC (SEQ ID NO: 1197) | 3′ PBS |
| 1198 | GGCTCTGTACT (SEQ ID NO: 1198) | 3′ PBS |
| 1199 | GGCTCTGTACTT (SEQ ID NO: 1199) | 3′ PBS |
| 1200 | GGCTCTGTACTTG (SEQ ID NO: 1200) | 3′ PBS |
| 1201 | GGCTCTGTACTTGG (SEQ ID NO: 1201) | 3′ PBS |
| 1202 | GGCTCTGTACTTGGG (SEQ ID NO: 1202) | 3′ PBS |
| 1203 | GGCTCTGTACTTGGGG (SEQ ID NO: 1203) | 3′ PBS |
| 1204 | GGCTCTGTACTTGGGGT (SEQ ID NO: 1204) | 3′ PBS |
| 1205 | GGCTCTGTACTTGGGGTA (SEQ ID NO: 1205) | 3′ PBS |
| 1206 | GGCTCTGTACTTGGGGTAT (SEQ ID NO: 1206) | 3′ PBS |
| 1207 | ACCCCAAGTACAGAGCCTGAGTTTTAGAGCTAG | 3′ pegRNA |
| | AAATAGCAAGTTAAAATAAGGCTAGTCCGTTAT | |
| | CAACTTGAAAAAGTGGCACCGAGTCGGTGCATG | |
| | ATCCTGACGACGGAGACCGCCGTCGTCGACAAG | |
| | CCGGCTCTGTACTT (SEQ ID NO: 1207) | |
| 1208 | GACCCCAAGTACAGAGCCTGAGTTTTAGAGCTA | 3′ pegRNA, transcription |
| | GAAATAGCAAGTTAAAATAAGGCTAGTCCGTTA | adaptation (5′G, |
| | TCAACTTGAAAAAGTGGCACCGAGTCGGTGCAT | 3′TTTTTTT) |
| | GATCCTGACGACGGAGACCGCCGTCGTCGACAA | |
| | GCCGGCTCTGTACTTTTTTTTT (SEQ ID NO: 1208) | |
| 1209 | ACCCCAAGTACAGAGCCTGAGTTTTAGAGCTAG | 3′ pegRNA |
| | AAATAGCAAGTTAAAATAAGGCTAGTCCGTTAT | |
| | CAACTTGAAAAAGTGGCACCGAGTCGGTGCATG | |
| | ATCCTGACGACGGAGACCGCCGTCGTCGACAAG | |
| | CCGGCTCTGTAC (SEQ ID NO: 1209) | |
| 1210 | GACCCCAAGTACAGAGCCTGAGTTTTAGAGCTA | 3′ pegRNA, transcription |
| | GAAATAGCAAGTTAAAATAAGGCTAGTCCGTTA | adaptation (5′G, |
| | TCAACTTGAAAAAGTGGCACCGAGTCGGTGCAT | 3′TTTTTTT, 3′A) |
| | GATCCTGACGACGGAGACCGCCGTCGTCGACAA | |
| | GCCGGCTCTGTACATTTTTTT (SEQ ID NO: 1210) | |
| 1212 | ACCCCAAGTACAGAGCCTGAGTTTTAGAGCTAG | 3′ pegRNA, transcription |
| | AAATAGCAAGTTAAAATAAGGCTAGTCCGTTAT | adaptation (3′TTTT) |
| | CAACTTGAAAAAGTGGCACCGAGTCGGTGCATG | |
| | ATCCTGACGACGGAGACCGCCGTCGTCGACAAG | |
| | CCGGCTCTGTACTTTTTT (SEQ ID NO: 1212) | |
| 1213 | ACCCCAAGTACAGAGCCTGAGTTTTAGAGCTAG | 3′ pegRNA, transcription |
| | AAATAGCAAGTTAAAATAAGGCTAGTCCGTTAT | adaptation (3′TTTT) |
| | CAACTTGAAAAAGTGGCACCGAGTCGGTGCATG | |
| | ATCCTGACGACGGAGACCGCCGTCGTCGACAAG | |
| | CCGGCTCTGTACATTTT (SEQ ID NO: 1213) | |
| 1214 | ACCCCAAGTACAGAGCCTGAGTTTTAGAGCTAG | 3′ pegRNA |
| | AAATAGCAAGTTAAAATAAGGCTAGTCCGTTAT | |
| | CAACTTGAAAAAGTGGCACCGAGTCGGTGCATG | |
| | ATCCTGACGACGGAGACCGCCGTCGTCGACAAG | |
| | CCGGCTCTGTACA (SEQ ID NO: 1214) | |

TABLE 29
Exemplary 3′ PEgRNA and component sequence

| Sequence | | |
|---|---|---|
| number | Sequence | Description |
| 1215 | GCCCCAGAGTCTGTGCACAG (SEQ ID NO: 1215) | 3′ Spacer |
| 1216 | CCAGAGTCTGTGCACAG (SEQ ID NO: 1216) | 3′ Spacer |
| 1217 | CCCAGAGTCTGTGCACAG (SEQ ID NO: 1217) | 3′ Spacer |
| 1218 | CCCCAGAGTCTGTGCACAG (SEQ ID NO: 1218) | 3′ Spacer |
| 1219 | GGCCCCAGAGTCTGTGCACAG (SEQ ID NO: 1219) | 3′ Spacer |
| 1220 | TGGCCCCAGAGTCTGTGCACAG (SEQ ID NO: | 3′ Spacer |
| | 1220) | |
| 1221 | TGCAC | 3′ PBS |
| 1222 | TGCACA | 3′ PBS |
| 1223 | TGCACAG | 3′ PBS |
| 1224 | TGCACAGA | 3′ PBS |
| 1225 | TGCACAGAC | 3′ PBS |
| 1226 | TGCACAGACT (SEQ ID NO: 1226) | 3′ PBS |
| 1227 | TGCACAGACTC (SEQ ID NO: 1227) | 3′ PBS |
| 1228 | TGCACAGACTCT (SEQ ID NO: 1228) | 3′ PBS |
| 1229 | TGCACAGACTCTG (SEQ ID NO: 1229) | 3′ PBS |
| 1230 | TGCACAGACTCTGG (SEQ ID NO: 1230) | 3′ PBS |
| 1231 | TGCACAGACTCTGGG (SEQ ID NO: 1231) | 3′ PBS |
| 1232 | TGCACAGACTCTGGGG (SEQ ID NO: 1232) | 3′ PBS |
| 1233 | TGCACAGACTCTGGGGC (SEQ ID NO: 1233) | 3′ PBS |
| 1234 | TGCACAGACTCTGGGGCC (SEQ ID NO: 1234) | 3′ PBS |
| 1235 | TGCACAGACTCTGGGGCCA (SEQ ID NO: 1235) | 3′ PBS |
| 1236 | GCCCCAGAGTCTGTGCACAGGTTTTAGAGCTAG | 3′ pegRNA |
| | AAATAGCAAGTTAAAATAAGGCTAGTCCGTTAT | |
| | CAACTTGAAAAAGTGGCACCGAGTCGGTGCATG | |
| | ATCCTGACGACGGAGACCGCCGTCGTCGACAAG | |
| | CCTGCACAGACTCT (SEQ ID NO: 1236) | |
| 1237 | GCCCCAGAGTCTGTGCACAGGTTTTAGAGCTAG | 3′ pegRNA, transcription |
| | AAATAGCAAGTTAAAATAAGGCTAGTCCGTTAT | adaptation (3′TTTTTTT) |
| | CAACTTGAAAAAGTGGCACCGAGTCGGTGCATG | |
| | ATCCTGACGACGGAGACCGCCGTCGTCGACAAG | |
| | CCTGCACAGACTCTTTTTTTT (SEQ ID NO: 1237) | |
| 1238 | GCCCCAGAGTCTGTGCACAGGTTTTAGAGCTAG | 3′ pegRNA |
| | AAATAGCAAGTTAAAATAAGGCTAGTCCGTTAT | |
| | CAACTTGAAAAAGTGGCACCGAGTCGGTGCATG | |
| | ATCCTGACGACGGAGACCGCCGTCGTCGACAAG | |
| | CCTGCACAGACT (SEQ ID NO: 1238) | |
| 1239 | GCCCCAGAGTCTGTGCACAGGTTTTAGAGCTAG | 3′ pegRNA, transcription |
| | AAATAGCAAGTTAAAATAAGGCTAGTCCGTTAT | adaptation (3′TTTTTTT) |
| | CAACTTGAAAAAGTGGCACCGAGTCGGTGCATG | |
| | ATCCTGACGACGGAGACCGCCGTCGTCGACAAG | |
| | CCTGCACAGACTTTTTTTT (SEQ ID NO: 1239) | |
| 1240 | GCCCCAGAGTCTGTGCACAGGTTTTAGAGCTAG | 3′ pegRNA |
| | AAATAGCAAGTTAAAATAAGGCTAGTCCGTTAT | |
| | CAACTTGAAAAAGTGGCACCGAGTCGGTGCAAA | |
| | GTCTCATTTGACTTATGCACAGACT (SEQ ID NO: | |
| | 1240) | |
| 1241 | GCCCCAGAGTCTGTGCACAGGTTTTAGAGCTAG | 3′ pegRNA, transcription |
| | AAATAGCAAGTTAAAATAAGGCTAGTCCGTTAT | adaptation (3′TTTTTTT, |
| | CAACTTGAAAAAGTGGCACCGAGTCGGTGCAAA | 3′A) |
| | GTCTCATTTGACTTATGCACAGACTATTTTTTT | |
| | (SEQ ID NO: 1241) | |
| 1242 | GCCCCAGAGTCTGTGCACAGGTTTTAGAGCTAG | 3′ pegRNA |
| | AAATAGCAAGTTAAAATAAGGCTAGTCCGTTAT | |
| | CAACTTGAAAAAGTGGCACCGAGTCGGTGCAGG | |
| | CAGGATCTTGAAATTTGCACAGACT (SEQ ID NO: | |
| | 1242) | |
| 1243 | GCCCCAGAGTCTGTGCACAGGTTTTAGAGCTAG | 3′ pegRNA, transcription |
| | AAATAGCAAGTTAAAATAAGGCTAGTCCGTTAT | adaptation (3′TTTTTTT, |
| | CAACTTGAAAAAGTGGCACCGAGTCGGTGCAGG | 3′A) |
| | CAGGATCTTGAAATTTGCACAGACTATTTTTTT | |
| | (SEQ ID NO: 1243) | |
| 1244 | GCCCCAGAGTCTGTGCACAGGTTTTAGAGCTAG | 3′ pegRNA |
| | AAATAGCAAGTTAAAATAAGGCTAGTCCGTTAT | |
| | CAACTTGAAAAAGTGGCACCGAGTCGGTGCGTA | |
| | CATGGCAGAGAGCAATGCACAGACT (SEQ ID NO: | |
| | 1244) | |
| 1245 | GCCCCAGAGTCTGTGCACAGGTTTTAGAGCTAG | 3′ pegRNA, transcription |
| | AAATAGCAAGTTAAAATAAGGCTAGTCCGTTAT | adaptation (3′TTTTTTT, |
| | CAACTTGAAAAAGTGGCACCGAGTCGGTGCGTA | 3′A) |
| | CATGGCAGAGAGCAATGCACAGACTATTTTTTT | |
| | (SEQ ID NO: 1245) | |
| 1246 | GCCCCAGAGTCTGTGCACAGGTTTTAGAGCTAG | 3′ pegRNA |
| | AAATAGCAAGTTAAAATAAGGCTAGTCCGTTAT | |
| | CAACTTGAAAAAGTGGCACCGAGTCGGTGCAGA | |
| | ACGGCCAAAGGTTGCACAGACT (SEQ ID NO: | |
| | 1246) | |
| 1247 | GCCCCAGAGTCTGTGCACAGGTTTTAGAGCTAG | 3′ pegRNA, transcription |
| | AAATAGCAAGTTAAAATAAGGCTAGTCCGTTAT | adaptation (3′TTTTTTT, |
| | CAACTTGAAAAAGTGGCACCGAGTCGGTGCAGA | 3′A) |
| | ACGGCCAAAGGTTGCACAGACTATTTTTTT (SEQ | |
| | ID NO: 1247) | |
| 1248 | GCCCCAGAGTCTGTGCACAGGTTTTAGAGCTAG | 3′ pegRNA |
| | AAATAGCAAGTTAAAATAAGGCTAGTCCGTTAT | |
| | CAACTTGAAAAAGTGGCACCGAGTCGGTGCACC | |
| | CAAGAGGAGGGCAGATGCACAGACT (SEQ ID | |
| | NO: 1248) | |
| 1249 | GCCCCAGAGTCTGTGCACAGGTTTTAGAGCTAG | 3′ pegRNA, transcription |
| | AAATAGCAAGTTAAAATAAGGCTAGTCCGTTAT | adaptation (3′TTTTTTT, |
| | CAACTTGAAAAAGTGGCACCGAGTCGGTGCACC | 3′A) |
| | CAAGAGGAGGGCAGATGCACAGACTATTTTTTT | |
| | (SEQ ID NO: 1249) | |
| 1250 | GCCCCAGAGTCTGTGCACAGGTTTTAGAGCTAG | 3′ pegRNA |
| | AAATAGCAAGTTAAAATAAGGCTAGTCCGTTAT | |
| | CAACTTGAAAAAGTGGCACCGAGTCGGTGCGGA | |
| | CGGCCCGTACATTGCACAGACT (SEQ ID NO: | |
| | 1250) | |
| 1251 | GCCCCAGAGTCTGTGCACAGGTTTTAGAGCTAG | 3′ pegRNA, transcription |
| | AAATAGCAAGTTAAAATAAGGCTAGTCCGTTAT | adaptation (3′TTTTTTT, |
| | CAACTTGAAAAAGTGGCACCGAGTCGGTGCGGA | 3′A) |
| | CGGCCCGTACATTGCACAGACTATTTTTTT (SEQ | |
| | ID NO: 1251) | |
| 1252 | GCCCCAGAGTCTGTGCACAGGTTTTAGAGCTAG | 3′ pegRNA |
| | AAATAGCAAGTTAAAATAAGGCTAGTCCGTTAT | |
| | CAACTTGAAAAAGTGGCACCGAGTCGGTGCAGG | |
| | CCTGGCGTCCAGGCCTGCACAGACT (SEQ ID NO: | |
| | 1252) | |
| 1253 | GCCCCAGAGTCTGTGCACAGGTTTTAGAGCTAG | 3′ pegRNA, transcription |
| | AAATAGCAAGTTAAAATAAGGCTAGTCCGTTAT | adaptation (3′TTTTTTT, |
| | CAACTTGAAAAAGTGGCACCGAGTCGGTGCAGG | 3′A) |
| | CCTGGCGTCCAGGCCTGCACAGACTATTTTTTT | |
| | (SEQ ID NO: 1253) | |
| 1254 | GCCCCAGAGTCTGTGCACAGGTTTTAGAGCTAG | 3′ pegRNA |
| | AAATAGCAAGTTAAAATAAGGCTAGTCCGTTAT | |
| | CAACTTGAAAAAGTGGCACCGAGTCGGTGCAGC | |
| | CGCCGTGCGGCATGCACAGACT (SEQ ID NO: | |
| | 1254) | |
| 1255 | GCCCCAGAGTCTGTGCACAGGTTTTAGAGCTAG | 3′ pegRNA, transcription |
| | AAATAGCAAGTTAAAATAAGGCTAGTCCGTTAT | adaptation (3′TTTTTTT, |
| | CAACTTGAAAAAGTGGCACCGAGTCGGTGCAGC | 3′A) |
| | CGCCGTGCGGCATGCACAGACTATTTTTTT (SEQ | |
| | ID NO: 1255) | |
| 1256 | GCCCCAGAGTCTGTGCACAGGTTTTAGAGCTAG | 3′ pegRNA |
| | AAATAGCAAGTTAAAATAAGGCTAGTCCGTTAT | |
| | CAACTTGAAAAAGTGGCACCGAGTCGGTGCTCA | |
| | TACACAGAGCAAACTCCAATGCACAGACT (SEQ | |
| | ID NO: 1256) | |
| 1257 | GCCCCAGAGTCTGTGCACAGGTTTTAGAGCTAG | 3′ pegRNA, transcription |
| | AAATAGCAAGTTAAAATAAGGCTAGTCCGTTAT | adaptation (3′TTTTTTT, |
| | CAACTTGAAAAAGTGGCACCGAGTCGGTGCTCA | 3′A) |
| | TACACAGAGCAAACTCCAATGCACAGACTATTT | |
| | TTTT (SEQ ID NO: 1257) | |
| 1258 | GCCCCAGAGTCTGTGCACAGGTTTTAGAGCTAG | 3′ pegRNA |
| | AAATAGCAAGTTAAAATAAGGCTAGTCCGTTAT | |
| | CAACTTGAAAAAGTGGCACCGAGTCGGTGCACA | |
| | GCACCATCTAGTGTAAATGCACAGACT (SEQ ID | |
| | NO: 1258) | |
| 1259 | GCCCCAGAGTCTGTGCACAGGTTTTAGAGCTAG | 3′ pegRNA, transcription |
| | AAATAGCAAGTTAAAATAAGGCTAGTCCGTTAT | adaptation (3′TTTTTTT, |
| | CAACTTGAAAAAGTGGCACCGAGTCGGTGCACA | 3′A) |
| | GCACCATCTAGTGTAAATGCACAGACTATTTTTT | |
| | T (SEQ ID NO: 1259) | |
| 1260 | GCCCCAGAGTCTGTGCACAGGTTTTAGAGCTAG | 3′ pegRNA |
| | AAATAGCAAGTTAAAATAAGGCTAGTCCGTTAT | |
| | CAACTTGAAAAAGTGGCACCGAGTCGGTGCCTC | |
| | GTCACTGGATGTGAAGTTGCACAGACT (SEQ ID | |
| | NO: 1260) | |
| 1261 | GCCCCAGAGTCTGTGCACAGGTTTTAGAGCTAG | 3′ pegRNA, transcription |
| | AAATAGCAAGTTAAAATAAGGCTAGTCCGTTAT | adaptation (3′TTTTTTT, |
| | CAACTTGAAAAAGTGGCACCGAGTCGGTGCCTC | 3′A) |
| | GTCACTGGATGTGAAGTTGCACAGACTATTTTTT | |
| | T (SEQ ID NO: 1261) | |
| 1262 | GCCCCAGAGTCTGTGCACAGGTTTTAGAGCTAG | 3′ pegRNA |
| | AAATAGCAAGTTAAAATAAGGCTAGTCCGTTAT | |
| | CAACTTGAAAAAGTGGCACCGAGTCGGTGCTTG | |
| | ATGTCGTAGGTGATACCGCTGCACAGACT (SEQ | |
| | ID NO: 1262) | |
| 1263 | GCCCCAGAGTCTGTGCACAGGTTTTAGAGCTAG | 3′ pegRNA, transcription |
| | AAATAGCAAGTTAAAATAAGGCTAGTCCGTTAT | adaptation (3′TTTTTTT, |
| | CAACTTGAAAAAGTGGCACCGAGTCGGTGCTTG | 3′A) |
| | ATGTCGTAGGTGATACCGCTGCACAGACTATTTT | |
| | TTT (SEQ ID NO: 1263) | |
| 1264 | GCCCCAGAGTCTGTGCACAGGTTTTAGAGCTAG | 3′ pegRNA |
| | AAATAGCAAGTTAAAATAAGGCTAGTCCGTTAT | |
| | CAACTTGAAAAAGTGGCACCGAGTCGGTGCGGA | |
| | TCGTCCCTCAGGGGCAGTGCACAGACT (SEQ ID | |
| | NO: 1264) | |
| 1265 | GCCCCAGAGTCTGTGCACAGGTTTTAGAGCTAG | 3′ pegRNA, transcription |
| | AAATAGCAAGTTAAAATAAGGCTAGTCCGTTAT | adaptation (3′TTTTTTT, |
| | CAACTTGAAAAAGTGGCACCGAGTCGGTGCGGA | 3′A) |
| | TCGTCCCTCAGGGGCAGTGCACAGACTATTTTTT | |
| | T (SEQ ID NO: 1265) | |
| 1266 | GCCCCAGAGTCTGTGCACAGGTTTTAGAGCTAG | 3′ pegRNA |
| | AAATAGCAAGTTAAAATAAGGCTAGTCCGTTAT | |
| | CAACTTGAAAAAGTGGCACCGAGTCGGTGCTCG | |
| | TGGTCTCGGGCATCAGACCCTGCACAGACT (SEQ | |
| | ID NO: 1266) | |
| 1267 | GCCCCAGAGTCTGTGCACAGGTTTTAGAGCTAG | 3′ pegRNA, transcription |
| | AAATAGCAAGTTAAAATAAGGCTAGTCCGTTAT | adaptation (3′TTTTTTT, |
| | CAACTTGAAAAAGTGGCACCGAGTCGGTGCTCG | 3′A) |
| | TGGTCTCGGGCATCAGACCCTGCACAGACTATTT | |
| | TTTT (SEQ ID NO: 1267) | |
| 1268 | GCCCCAGAGTCTGTGCACAGGTTTTAGAGCTAG | 3′ pegRNA |
| | AAATAGCAAGTTAAAATAAGGCTAGTCCGTTAT | |
| | CAACTTGAAAAAGTGGCACCGAGTCGGTGCCCG | |
| | CACTCGGCCCGTGGGGCTGCACAGACT (SEQ ID | |
| | NO: 1268) | |
| 1269 | GCCCCAGAGTCTGTGCACAGGTTTTAGAGCTAG | 3′ pegRNA, transcription |
| | AAATAGCAAGTTAAAATAAGGCTAGTCCGTTAT | adaptation (3′TTTTTTT, |
| | CAACTTGAAAAAGTGGCACCGAGTCGGTGCCCG | 3′A) |
| | CACTCGGCCCGTGGGGCTGCACAGACTATTTTTT | |
| | T (SEQ ID NO: 1269) | |
| 1270 | GCCCCAGAGTCTGTGCACAGGTTTTAGAGCTAG | 3′ pegRNA |
| | AAATAGCAAGTTAAAATAAGGCTAGTCCGTTAT | |
| | CAACTTGAAAAAGTGGCACCGAGTCGGTGCGAT | |
| | TTGATAATCTCGTATATAGAGCAGTTATGCACAG | |
| | ACT (SEQ ID NO: 1270) | |
| 1271 | GCCCCAGAGTCTGTGCACAGGTTTTAGAGCTAG | 3′ pegRNA, transcription |
| | AAATAGCAAGTTAAAATAAGGCTAGTCCGTTAT | adaptation (3′TTTTTTT, |
| | CAACTTGAAAAAGTGGCACCGAGTCGGTGCGAT | 3′A) |
| | TTGATAATCTCGTATATAGAGCAGTTATGCACAG | |
| | ACTATTTTTTT (SEQ ID NO: 1271) | |
| 1272 | GCCCCAGAGTCTGTGCACAGGTTTTAGAGCTAG | 3′ pegRNA |
| | AAATAGCAAGTTAAAATAAGGCTAGTCCGTTAT | |
| | CAACTTGAAAAAGTGGCACCGAGTCGGTGCGTG | |
| | TCTCATGTTTCCTTGTATTACGTTACCTGCACAG | |
| | ACT (SEQ ID NO: 1272) | |
| 1273 | GCCCCAGAGTCTGTGCACAGGTTTTAGAGCTAG | 3′ pegRNA, transcription |
| | AAATAGCAAGTTAAAATAAGGCTAGTCCGTTAT | adaptation (3′TTTTTTT, |
| | CAACTTGAAAAAGTGGCACCGAGTCGGTGCGTG | 3′A) |
| | TCTCATGTTTCCTTGTATTACGTTACCTGCACAG | |
| | ACTATTTTTTT (SEQ ID NO: 1273) | |
| 1274 | GCCCCAGAGTCTGTGCACAGGTTTTAGAGCTAG | 3′ pegRNA |
| | AAATAGCAAGTTAAAATAAGGCTAGTCCGTTAT | |
| | CAACTTGAAAAAGTGGCACCGAGTCGGTGCGTA | |
| | ATCCAAGCTCACTAGGGGCACAACTTGTGCACA | |
| | GACT (SEQ ID NO: 1274) | |
| 1275 | GCCCCAGAGTCTGTGCACAGGTTTTAGAGCTAG | 3′ pegRNA, transcription |
| | AAATAGCAAGTTAAAATAAGGCTAGTCCGTTAT | adaptation (3′TTTTTTT, |
| | CAACTTGAAAAAGTGGCACCGAGTCGGTGCGTA | 3′A) |
| | ATCCAAGCTCACTAGGGGCACAACTTGTGCACA | |
| | GACTATTTTTTT (SEQ ID NO: 1275) | |
| 1276 | GCCCCAGAGTCTGTGCACAGGTTTTAGAGCTAG | 3′ pegRNA |
| | AAATAGCAAGTTAAAATAAGGCTAGTCCGTTAT | |
| | CAACTTGAAAAAGTGGCACCGAGTCGGTGCCTA | |
| | TCATGCATGGCGATCCCAGGTTCGCGCTGCACA | |
| | GACT (SEQ ID NO: 1276) | |
| 1277 | GCCCCAGAGTCTGTGCACAGGTTTTAGAGCTAG | 3′ pegRNA, transcription |
| | AAATAGCAAGTTAAAATAAGGCTAGTCCGTTAT | adaptation (3′TTTTTTT, |
| | CAACTTGAAAAAGTGGCACCGAGTCGGTGCCTA | 3′A) |
| | TCATGCATGGCGATCCCAGGTTCGCGCTGCACA | |
| | GACTATTTTTTT (SEQ ID NO: 1277) | |
| 1278 | GCCCCAGAGTCTGTGCACAGGTTTTAGAGCTAG | 3′ pegRNA |
| | AAATAGCAAGTTAAAATAAGGCTAGTCCGTTAT | |
| | CAACTTGAAAAAGTGGCACCGAGTCGGTGCGGC | |
| | TTGTCGACGACGGCGGTCTCCGTCGTCAGGATCA | |
| | TTGCACAGACT (SEQ ID NO: 1278) | |
| 1279 | GCCCCAGAGTCTGTGCACAGGTTTTAGAGCTAG | 3′ pegRNA, transcription |
| | AAATAGCAAGTTAAAATAAGGCTAGTCCGTTAT | adaptation (3′TTTTTTT, |
| | CAACTTGAAAAAGTGGCACCGAGTCGGTGCGGC | 3′A) |
| | TTGTCGACGACGGCGGTCTCCGTCGTCAGGATCA | |
| | TTGCACAGACTATTTTTTT (SEQ ID NO: 1279) | |
| 1280 | GCCCCAGAGTCTGTGCACAGGTTTTAGAGCTAG | 3′ pegRNA |
| | AAATAGCAAGTTAAAATAAGGCTAGTCCGTTAT | |
| | CAACTTGAAAAAGTGGCACCGAGTCGGTGCAAA | |
| | TATCTGACCCAGTTACGTGCACAGACTC (SEQ ID | |
| | NO: 1280) | |
| 1281 | GCCCCAGAGTCTGTGCACAGGTTTTAGAGCTAG | 3′ pegRNA, transcription |
| | AAATAGCAAGTTAAAATAAGGCTAGTCCGTTAT | adaptation (3′TTTTTTT) |
| | CAACTTGAAAAAGTGGCACCGAGTCGGTGCAAA | |
| | TATCTGACCCAGTTACGTGCACAGACTCTTTTTT | |
| | T (SEQ ID NO: 1281) | |
| 1282 | GCCCCAGAGTCTGTGCACAGGTTTTAGAGCTAG | 3′ pegRNA |
| | AAATAGCAAGTTAAAATAAGGCTAGTCCGTTAT | |
| | CAACTTGAAAAAGTGGCACCGAGTCGGTGCAAA | |
| | TATCTGACCCAGTTACGTGCACAGACTCTG (SEQ | |
| | ID NO: 1282) | |
| 1283 | GCCCCAGAGTCTGTGCACAGGTTTTAGAGCTAG | 3′ pegRNA, transcription |
| | AAATAGCAAGTTAAAATAAGGCTAGTCCGTTAT | adaptation (3′TTTTTTT) |
| | CAACTTGAAAAAGTGGCACCGAGTCGGTGCAAA | |
| | TATCTGACCCAGTTACGTGCACAGACTCTGTTTT | |
| | TTT (SEQ ID NO: 1283) | |
| 1284 | GCCCCAGAGTCTGTGCACAGGTTTTAGAGCTAG | 3′ pegRNA |
| | AAATAGCAAGTTAAAATAAGGCTAGTCCGTTAT | |
| | CAACTTGAAAAAGTGGCACCGAGTCGGTGCCAA | |
| | AGAAATATCTGACCCAGTTACGTGCACAGACTC | |
| | (SEQ ID NO: 1284) | |
| 1285 | GCCCCAGAGTCTGTGCACAGGTTTTAGAGCTAG | 3′ pegRNA, transcription |
| | AAATAGCAAGTTAAAATAAGGCTAGTCCGTTAT | adaptation (3′TTTTTTT) |
| | CAACTTGAAAAAGTGGCACCGAGTCGGTGCCAA | |
| | AGAAATATCTGACCCAGTTACGTGCACAGACTC | |
| | TTTTTTT (SEQ ID NO: 1285) | |
| 1286 | GCCCCAGAGTCTGTGCACAGGTTTTAGAGCTAG | 3′ pegRNA |
| | AAATAGCAAGTTAAAATAAGGCTAGTCCGTTAT | |
| | CAACTTGAAAAAGTGGCACCGAGTCGGTGCCAA | |
| | AGAAATATCTGACCCAGTTACGTGCACAGACTC | |
| | TG (SEQ ID NO: 1286) | |
| 1287 | GCCCCAGAGTCTGTGCACAGGTTTTAGAGCTAG | 3′ pegRNA, transcription |
| | AAATAGCAAGTTAAAATAAGGCTAGTCCGTTAT | adaptation (3′TTTTTTT) |
| | CAACTTGAAAAAGTGGCACCGAGTCGGTGCCAA | |
| | AGAAATATCTGACCCAGTTACGTGCACAGACTC | |
| | TGTTTTTTT (SEQ ID NO: 1287) | |
| 1288 | GCCCCAGAGTCTGTGCACAGGTTTTAGAGCTAG | 3′ pegRNA |
| | AAATAGCAAGTTAAAATAAGGCTAGTCCGTTAT | |
| | CAACTTGAAAAAGTGGCACCGAGTCGGTGCGGG | |
| | TACAAAGAAATATCTGACCCAGTTACGTGCACA | |
| | GACTC (SEQ ID NO: 1288) | |
| 1289 | GCCCCAGAGTCTGTGCACAGGTTTTAGAGCTAG | 3′ pegRNA, transcription |
| | AAATAGCAAGTTAAAATAAGGCTAGTCCGTTAT | adaptation (3′TTTTTTT) |
| | CAACTTGAAAAAGTGGCACCGAGTCGGTGCGGG | |
| | TACAAAGAAATATCTGACCCAGTTACGTGCACA | |
| | GACTCTTTTTTT (SEQ ID NO: 1289) | |
| 1290 | GCCCCAGAGTCTGTGCACAGGTTTTAGAGCTAG | 3′ pegRNA |
| | AAATAGCAAGTTAAAATAAGGCTAGTCCGTTAT | |
| | CAACTTGAAAAAGTGGCACCGAGTCGGTGCGGG | |
| | TACAAAGAAATATCTGACCCAGTTACGTGCACA | |
| | GACTCTG (SEQ ID NO: 1290) | |
| 1291 | GCCCCAGAGTCTGTGCACAGGTTTTAGAGCTAG | 3′ pegRNA, transcription |
| | AAATAGCAAGTTAAAATAAGGCTAGTCCGTTAT | adaptation (3′TTTTTTT) |
| | CAACTTGAAAAAGTGGCACCGAGTCGGTGCGGG | |
| | TACAAAGAAATATCTGACCCAGTTACGTGCACA | |
| | GACTCTGTTTTTTT (SEQ ID NO: 1291) | |
| 1292 | GCCCCAGAGTCTGTGCACAGGTTTTAGAGCTAG | 3′ pegRNA |
| | AAATAGCAAGTTAAAATAAGGCTAGTCCGTTAT | |
| | CAACTTGAAAAAGTGGCACCGAGTCGGTGCATG | |
| | ATCCTGACGACGGAGACCGCCGTCGTCGACAAG | |
| | CCTGCACAGA (SEQ ID NO: 1292) | |
| 1293 | GCCCCAGAGTCTGTGCACAGGTTTTAGAGCTAG | 3′ pegRNA, transcription |
| | AAATAGCAAGTTAAAATAAGGCTAGTCCGTTAT | adaptation (3′TTTTTTT) |
| | CAACTTGAAAAAGTGGCACCGAGTCGGTGCATG | |
| | ATCCTGACGACGGAGACCGCCGTCGTCGACAAG | |
| | CCTGCACAGATTTTTTT (SEQ ID NO: 1293) | |
| 1294 | GCCCCAGAGTCTGTGCACAGGTTTTAGAGCTAG | 3′ pegRNA |
| | AAATAGCAAGTTAAAATAAGGCTAGTCCGTTAT | |
| | CAACTTGAAAAAGTGGCACCGAGTCGGTGCATG | |
| | ATCCTGACGACGGAGACCGCCGTCGTCGACAAG | |
| | CCTGCACAGAC (SEQ ID NO: 1294) | |
| 1295 | GCCCCAGAGTCTGTGCACAGGTTTTAGAGCTAG | 3′ pegRNA, transcription |
| | AAATAGCAAGTTAAAATAAGGCTAGTCCGTTAT | adaptation (3′TTTTTTT) |
| | CAACTTGAAAAAGTGGCACCGAGTCGGTGCATG | |
| | ATCCTGACGACGGAGACCGCCGTCGTCGACAAG | |
| | CCTGCACAGACTTTTTTT (SEQ ID NO: 1295) | |
| 1296 | GCCCCAGAGTCTGTGCACAGGTTTTAGAGCTAG | 3′ pegRNA |
| | AAATAGCAAGTTAAAATAAGGCTAGTCCGTTAT | |
| | CAACTTGAAAAAGTGGCACCGAGTCGGTGCATG | |
| | ATCCTGACGACGGAGACCGCCGTCGTCGACAAG | |
| | CCTGCACAGACTC (SEQ ID NO: 1296) | |
| 1297 | GCCCCAGAGTCTGTGCACAGGTTTTAGAGCTAG | 3′ pegRNA, transcription |
| | AAATAGCAAGTTAAAATAAGGCTAGTCCGTTAT | adaptation (3′TTTTTTT) |
| | CAACTTGAAAAAGTGGCACCGAGTCGGTGCATG | |
| | ATCCTGACGACGGAGACCGCCGTCGTCGACAAG | |
| | CCTGCACAGACTCTTTTTTT (SEQ ID NO: 1297) | |
| 1298 | GCCCCAGAGTCTGTGCACAGGTTTTAGAGCTAG | 3′ pegRNA |
| | AAATAGCAAGTTAAAATAAGGCTAGTCCGTTAT | |
| | CAACTTGAAAAAGTGGCACCGAGTCGGTGCATG | |
| | ATCCTGACGACGGAGACCGCCGTCGTCGACAAG | |
| | CCTGCACAGACTCTG (SEQ ID NO: 1298) | |
| 1299 | GCCCCAGAGTCTGTGCACAGGTTTTAGAGCTAG | 3′ pegRNA, transcription |
| | AAATAGCAAGTTAAAATAAGGCTAGTCCGTTAT | adaptation (3′TTTTTTT) |
| | CAACTTGAAAAAGTGGCACCGAGTCGGTGCATG | |
| | ATCCTGACGACGGAGACCGCCGTCGTCGACAAG | |
| | CCTGCACAGACTCTGTTTTTTT (SEQ ID NO: 1299) | |
| 1300 | GCCCCAGAGTCTGTGCACAGGTTTTAGAGCTAG | 3′ pegRNA |
| | AAATAGCAAGTTAAAATAAGGCTAGTCCGTTAT | |
| | CAACTTGAAAAAGTGGCACCGAGTCGGTGCATG | |
| | ATCCTGACGACGGAGACCGCCGTCGTCGACAAG | |
| | CCTGCACAGACTCTGG (SEQ ID NO: 1300) | |
| 1301 | GCCCCAGAGTCTGTGCACAGGTTTTAGAGCTAG | 3′ pegRNA, transcription |
| | AAATAGCAAGTTAAAATAAGGCTAGTCCGTTAT | adaptation (3′TTTTTTT) |
| | CAACTTGAAAAAGTGGCACCGAGTCGGTGCATG | |
| | ATCCTGACGACGGAGACCGCCGTCGTCGACAAG | |
| | CCTGCACAGACTCTGGTTTTTTT (SEQ ID NO: | |
| | 1301) | |
| 1302 | GCCCCAGAGTCTGTGCACAGGTTTTAGAGCTAG | 3′ pegRNA |
| | AAATAGCAAGTTAAAATAAGGCTAGTCCGTTAT | |
| | CAACTTGAAAAAGTGGCACCGAGTCGGTGCATG | |
| | ATCCTGACGACGGAGACCGCCGTCGTCGACAAG | |
| | CCTGCACAGACTCTGGG (SEQ ID NO: 1302) | |
| 1303 | GCCCCAGAGTCTGTGCACAGGTTTTAGAGCTAG | 3′ pegRNA, transcription |
| | AAATAGCAAGTTAAAATAAGGCTAGTCCGTTAT | adaptation (3′TTTTTTT) |
| | CAACTTGAAAAAGTGGCACCGAGTCGGTGCATG | |
| | ATCCTGACGACGGAGACCGCCGTCGTCGACAAG | |
| | CCTGCACAGACTCTGGGTTTTTTT (SEQ ID NO: | |
| | 1303) | |
| 1304 | GCCCCAGAGTCTGTGCACAGGTTTTAGAGCTAG | 3′ pegRNA |
| | AAATAGCAAGTTAAAATAAGGCTAGTCCGTTAT | |
| | CAACTTGAAAAAGTGGCACCGAGTCGGTGCATG | |
| | ATCCTGACGACGGAGACCGCCGTCGTCGACAAG | |
| | CCTGCACAGACTCTGGGG (SEQ ID NO: 1304) | |
| 1305 | GCCCCAGAGTCTGTGCACAGGTTTTAGAGCTAG | 3′ pegRNA, transcription |
| | AAATAGCAAGTTAAAATAAGGCTAGTCCGTTAT | adaptation (3′TTTTTTT) |
| | CAACTTGAAAAAGTGGCACCGAGTCGGTGCATG | |
| | ATCCTGACGACGGAGACCGCCGTCGTCGACAAG | |
| | CCTGCACAGACTCTGGGGTTTTTTT (SEQ ID NO: | |
| | 1305) | |
| 1306 | GCCCCAGAGTCTGTGCACAGGTTTTAGAGCTAG | 3′ pegRNA |
| | AAATAGCAAGTTAAAATAAGGCTAGTCCGTTAT | |
| | CAACTTGAAAAAGTGGCACCGAGTCGGTGCATG | |
| | ATCCTGACGACGGAGACCGCCGTCGTCGACAAG | |
| | CCTGCACAGACTCTGGGGC (SEQ ID NO: 1306) | |
| 1307 | GCCCCAGAGTCTGTGCACAGGTTTTAGAGCTAG | 3′ pegRNA, transcription |
| | AAATAGCAAGTTAAAATAAGGCTAGTCCGTTAT | adaptation (3′TTTTTTT) |
| | CAACTTGAAAAAGTGGCACCGAGTCGGTGCATG | |
| | ATCCTGACGACGGAGACCGCCGTCGTCGACAAG | |
| | CCTGCACAGACTCTGGGGCTTTTTTT (SEQ ID NO: | |
| | 1307) | |
| 1308 | GCCCCAGAGTCTGTGCACAGGTTTAAGAGCGGG | 3′ pegRNA, gRNA core |
| | GAAATCCGCAAGTTTAAATAAGGCTAGTCCGTT | SEQ ID NO: 2259 |
| | ATCAGCGTGAAAACGCGGCACCGAGTCGGTGCA | |
| | TGATCCTGACGACGGAGACCGCCGTCGTCGACA | |
| | AGCCTGCACAGACTCT (SEQ ID NO: 1308) | |
| 1309 | GCCCCAGAGTCTGTGCACAGGTTTAAGAGCGGG | 3′ pegRNA, transcription |
| | GAAATCCGCAAGTTTAAATAAGGCTAGTCCGTT | adaptation (3′TTTTTTT), |
| | ATCAGCGTGAAAACGCGGCACCGAGTCGGTGCA | gRNA core SEQ ID NO: |
| | TGATCCTGACGACGGAGACCGCCGTCGTCGACA | 2259 |
| | AGCCTGCACAGACTCTTTTTTTT (SEQ ID NO: | |
| | 1309) | |
| 1310 | GCCCCAGAGTCTGTGCACAGGTTTTAGAGCTAG | 3′ pegRNA, linker sequence |
| | AAATAGCAAGTTAAAATAAGGCTAGTCCGTTAT | number 2251, 3′ motif SEQ |
| | CAACTTGAAAAAGTGGCACCGAGTCGGTGCATG | ID NO: 2237 |
| | ATCCTGACGACGGAGACCGCCGTCGTCGACAAG | |
| | CCTGCACAGACTCTCCCAATCGCGGTTCTATCTA | |
| | GTTACGCGTTAAACCAACTAGAA (SEQ ID NO: | |
| | 1310) | |
| 1311 | GCCCCAGAGTCTGTGCACAGGTTTTAGAGCTAG | 3′ pegRNA, linker sequence |
| | AAATAGCAAGTTAAAATAAGGCTAGTCCGTTAT | number 2251, 3′ motif SEQ |
| | CAACTTGAAAAAGTGGCACCGAGTCGGTGCATG | ID NO: 2237, transcription |
| | ATCCTGACGACGGAGACCGCCGTCGTCGACAAG | adaptation (3′TTTTTTT) |
| | CCTGCACAGACTCTCCCAATCGCGGTTCTATCTA | |
| | GTTACGCGTTAAACCAACTAGAATTTTTTT (SEQ | |
| | ID NO: 1311) | |
| 1312 | GCCCCAGAGTCTGTGCACAGGTTTTAGAGCTAG | 3′ pegRNA, linker sequence |
| | AAATAGCAAGTTAAAATAAGGCTAGTCCGTTAT | number 2244, 3′ motif SEQ |
| | CAACTTGAAAAAGTGGCACCGAGTCGGTGCATG | ID NO: 2237 |
| | ATCCTGACGACGGAGACCGCCGTCGTCGACAAG | |
| | CCTGCACAGACTCTCCCCCTCGCGGTTCTATCTA | |
| | GTTACGCGTTAAACCAACTAGAA (SEQ ID NO: | |
| | 1312) | |
| 1313 | GCCCCAGAGTCTGTGCACAGGTTTTAGAGCTAG | 3′ pegRNA, linker sequence |
| | AAATAGCAAGTTAAAATAAGGCTAGTCCGTTAT | number 2244, 3′ motif SEQ |
| | CAACTTGAAAAAGTGGCACCGAGTCGGTGCATG | ID NO: 2237, transcription |
| | ATCCTGACGACGGAGACCGCCGTCGTCGACAAG | adaptation (3′TTTTTTT) |
| | CCTGCACAGACTCTCCCCCTCGCGGTTCTATCTA | |
| | GTTACGCGTTAAACCAACTAGAATTTTTTT (SEQ | |
| | ID NO: 1313) | |
| 1314 | GCCCCAGAGTCTGTGCACAGGTTTAAGAGCGGG | 3′ pegRNA, linker sequence |
| | GAAATCCGCAAGTTTAAATAAGGCTAGTCCGTT | number 2253, 3′ motif SEQ |
| | ATCAGCGTGAAAACGCGGCACCGAGTCGGTGCA | ID NO: 2237, gRNA core |
| | TGATCCTGACGACGGAGACCGCCGTCGTCGACA | SEQ ID NO: 2259 |
| | AGCCTGCACAGACTCTCCTCCCCGCGGTTCTATC | |
| | TAGTTACGCGTTAAACCAACTAGAA (SEQ ID NO: | |
| | 1314) | |
| 1315 | GCCCCAGAGTCTGTGCACAGGTTTAAGAGCGGG | 3′ pegRNA, linker sequence |
| | GAAATCCGCAAGTTTAAATAAGGCTAGTCCGTT | number 2253, 3′ motif SEQ |
| | ATCAGCGTGAAAACGCGGCACCGAGTCGGTGCA | ID NO: 2237, transcription |
| | TGATCCTGACGACGGAGACCGCCGTCGTCGACA | adaptation (3′TTTTTTT), |
| | AGCCTGCACAGACTCTCCTCCCCGCGGTTCTATC | gRNA core SEQ ID NO: |
| | TAGTTACGCGTTAAACCAACTAGAATTTTTTT | 2259 |
| | (SEQ ID NO: 1315) | |
| 1316 | GCCCCAGAGTCTGTGCACAGGTTTAAGAGCGGG | 3′ pegRNA, linker sequence |
| | GAAATCCGCAAGTTTAAATAAGGCTAGTCCGTT | number 2246, 3′ motif SEQ |
| | ATCAGCGTGAAAACGCGGCACCGAGTCGGTGCA | ID NO: 2237, gRNA core |
| | TGATCCTGACGACGGAGACCGCCGTCGTCGACA | SEQ ID NO: 2259 |
| | AGCCTGCACAGACTCTCCTCCTCGCGGTTCTATC | |
| | TAGTTACGCGTTAAACCAACTAGAA (SEQ ID NO: | |
| | 1316) | |
| 1317 | GCCCCAGAGTCTGTGCACAGGTTTAAGAGCGGG | 3′ pegRNA, linker sequence |
| | GAAATCCGCAAGTTTAAATAAGGCTAGTCCGTT | number 2246, 3′ motif SEQ |
| | ATCAGCGTGAAAACGCGGCACCGAGTCGGTGCA | ID NO: 2237, transcription |
| | TGATCCTGACGACGGAGACCGCCGTCGTCGACA | adaptation (3′TTTTTTT), |
| | AGCCTGCACAGACTCTCCTCCTCGCGGTTCTATC | gRNA core SEQ ID NO: |
| | TAGTTACGCGTTAAACCAACTAGAATTTTTTT | 2259 |
| | (SEQ ID NO: 1317) | |
| 1318 | GCCCCAGAGTCTGTGCACAGGTATAAGAGCGGG | 3′ pegRNA, gRNA core |
| | GAAATCCGCAAGTTTATATAAGACTAGTTCGTTA | SEQ ID NO: 2272 |
| | TCAGCGTGAAAACGCGGCACCGAGTCGGTGCAT | |
| | GATCCTGACGACGGAGACCGCCGTCGTCGACAA | |
| | GCCTGCACAGACTCT (SEQ ID NO: 1318) | |
| 1319 | GCCCCAGAGTCTGTGCACAGGTATAAGAGCGGG | 3′ pegRNA, transcription |
| | GAAATCCGCAAGTTTATATAAGACTAGTTCGTTA | adaptation (3′TTTTTTT), |
| | TCAGCGTGAAAACGCGGCACCGAGTCGGTGCAT | gRNA core SEQ ID NO: |
| | GATCCTGACGACGGAGACCGCCGTCGTCGACAA | 2272 |
| | GCCTGCACAGACTCTTTTTTTT (SEQ ID NO: 1319) | |
| 1320 | GCCCCAGAGTCTGTGCACAGGTATAAGAGCGGG | 3′ pegRNA, gRNA core |
| | GAAATCCGCATGTTTATATAAGACTAGTTCGTTA | SEQ ID NO: 2270 |
| | GCAGCGTGAAAACGCGGCACCGAGTCGGTGCAT | |
| | GATCCTGACGACGGAGACCGCCGTCGTCGACAA | |
| | GCCTGCACAGACTCT (SEQ ID NO: 1320) | |
| 1321 | GCCCCAGAGTCTGTGCACAGGTATAAGAGCGGG | 3′ pegRNA, transcription |
| | GAAATCCGCATGTTTATATAAGACTAGTTCGTTA | adaptation (3′TTTTTTT), |
| | GCAGCGTGAAAACGCGGCACCGAGTCGGTGCAT | gRNA core SEQ ID NO: |
| | GATCCTGACGACGGAGACCGCCGTCGTCGACAA | 2270 |
| | GCCTGCACAGACTCTTTTTTTT (SEQ ID NO: 1321) | |
| 1322 | GCCCCAGAGTCTGTGCACAGGTTTTAGAGCTAG | 3′ pegRNA, transcription |
| | AAATAGCAAGTTAAAATAAGGCTAGTCCGTTAT | adaptation (3′TTTT) |
| | CAACTTGAAAAAGTGGCACCGAGTCGGTGCATG | |
| | ATCCTGACGACGGAGACCGCCGTCGTCGACAAG | |
| | CCTGCACAGACTCTTTTT (SEQ ID NO: 1322) | |
| 1323 | GCCCCAGAGTCTGTGCACAGGTTTTAGAGCTAG | 3′ pegRNA, transcription |
| | AAATAGCAAGTTAAAATAAGGCTAGTCCGTTAT | adaptation (3′TTTT) |
| | CAACTTGAAAAAGTGGCACCGAGTCGGTGCATG | |
| | ATCCTGACGACGGAGACCGCCGTCGTCGACAAG | |
| | CCTGCACAGACTTTTT (SEQ ID NO: 1323) | |
| 2561 | GCCCCAGAGTCTGTGCACAGGTTTTAGAGCTAG | 3′ pegRNA |
| | AAATAGCAAGTTAAAATAAGGCTAGTCCGTTAT | |
| | CAACTTGAAAAAGTGGCACCGAGTCGGTGCAAA | |
| | TCTCAAAGAGTGTGGCCCAGTGCTGAAAGTAGC | |
| | GGCGGACCATGCTTGCATCCTTTATGCACAGACT | |
| | C (SEQ ID NO: 2561) | |
| 2562 | GCCCCAGAGTCTGTGCACAGGTTTTAGAGCTAG | 3′ pegRNA |
| | AAATAGCAAGTTAAAATAAGGCTAGTCCGTTAT | |
| | CAACTTGAAAAAGTGGCACCGAGTCGGTGCTCA | |
| | AAGAGTGTGGCCCAGTGCTGAAAGTAGCGGCGG | |
| | ACCATGCTTGCATCCTTTATGCACAGACTC (SEQ | |
| | ID NO: 2562) | |
| 2563 | GCCCCAGAGTCTGTGCACAGGTTTTAGAGCTAG | 3′ pegRNA |
| | AAATAGCAAGTTAAAATAAGGCTAGTCCGTTAT | |
| | CAACTTGAAAAAGTGGCACCGAGTCGGTGCGAG | |
| | TGTGGCCCAGTGCTGAAAGTAGCGGCGGACCAT | |
| | GCTTGCATCCTTTATGCACAGACTC (SEQ ID NO: | |
| | 2563) | |
| 2564 | GCCCCAGAGTCTGTGCACAGGTTTTAGAGCTAG | 3′ pegRNA |
| | AAATAGCAAGTTAAAATAAGGCTAGTCCGTTAT | |
| | CAACTTGAAAAAGTGGCACCGAGTCGGTGCTGG | |
| | CCCAGTGCTGAAAGTAGCGGCGGACCATGCTTG | |
| | CATCCTTTATGCACAGACTC (SEQ ID NO: 2564) | |
| 2565 | GCCCCAGAGTCTGTGCACAGGTTTTAGAGCTAG | 3′ pegRNA |
| | AAATAGCAAGTTAAAATAAGGCTAGTCCGTTAT | |
| | CAACTTGAAAAAGTGGCACCGAGTCGGTGCAAA | |
| | TCTCAAAGAGTGTGGCCCAGTGCTGAAAGTAGC | |
| | GGCGGACCATGCTTGCATCCTTTATGCACAGACT | |
| | CT (SEQ ID NO: 2565) | |
| 2566 | GCCCCAGAGTCTGTGCACAGGTTTTAGAGCTAG | 3′ pegRNA |
| | AAATAGCAAGTTAAAATAAGGCTAGTCCGTTAT | |
| | CAACTTGAAAAAGTGGCACCGAGTCGGTGCTCA | |
| | AAGAGTGTGGCCCAGTGCTGAAAGTAGCGGCGG | |
| | ACCATGCTTGCATCCTTTATGCACAGACTCT | |
| | (SEQ ID NO: 2566) | |
| 2567 | GCCCCAGAGTCTGTGCACAGGTTTTAGAGCTAG | 3′ pegRNA |
| | AAATAGCAAGTTAAAATAAGGCTAGTCCGTTAT | |
| | CAACTTGAAAAAGTGGCACCGAGTCGGTGCTGG | |
| | CCCAGTGCTGAAAGTAGCGGCGGACCATGCTTG | |
| | CATCCTTTATGCACAGACTCT (SEQ ID NO: 2567) | |

TABLE 30
Exemplary 3′ PEgRNA and component sequence

| Sequence | | |
|---|---|---|
| number | Sequence | Description |
| 1324 | AAACGACCCCAAAAGGCTAG (SEQ ID NO: 1324) | 3′ Spacer |
| 1325 | CGACCCCAAAAGGCTAG (SEQ ID NO: 1325) | 3′ Spacer |
| 1326 | ACGACCCCAAAAGGCTAG (SEQ ID NO: 1326) | 3′ Spacer |
| 1327 | AACGACCCCAAAAGGCTAG (SEQ ID NO: 1327) | 3′ Spacer |
| 1328 | GAAACGACCCCAAAAGGCTAG (SEQ ID NO: 1328) | 3′ Spacer |
| 1329 | TGAAACGACCCCAAAAGGCTAG (SEQ ID NO: | 3′ Spacer |
| | 1329) | |
| 1330 | GCCTT | 3′ PBS |
| 1331 | GCCTTT | 3′ PBS |
| 1332 | GCCTTTT | 3′ PBS |
| 1333 | GCCTTTTG | 3′ PBS |
| 1334 | GCCTTTTGG | 3′ PBS |
| 1335 | GCCTTTTGGG (SEQ ID NO: 1335) | 3′ PBS |
| 1336 | GCCTTTTGGGG (SEQ ID NO: 1336) | 3′ PBS |
| 1337 | GCCTTTTGGGGT (SEQ ID NO: 1337) | 3′ PBS |
| 1338 | GCCTTTTGGGGTC (SEQ ID NO: 1338) | 3′ PBS |
| 1339 | GCCTTTTGGGGTCG (SEQ ID NO: 1339) | 3′ PBS |
| 1340 | GCCTTTTGGGGTCGT (SEQ ID NO: 1340) | 3′ PBS |
| 1341 | GCCTTTTGGGGTCGTT (SEQ ID NO: 1341) | 3′ PBS |
| 1342 | GCCTTTTGGGGTCGTTT (SEQ ID NO: 1342) | 3′ PBS |
| 1343 | GCCTTTTGGGGTCGTTTC (SEQ ID NO: 1343) | 3′ PBS |
| 1344 | GCCTTTTGGGGTCGTTTCA (SEQ ID NO: 1344) | 3′ PBS |
| 1345 | AAACGACCCCAAAAGGCTAGGTTTTAGAGCTAG | 3′ pegRNA |
| | AAATAGCAAGTTAAAATAAGGCTAGTCCGTTAT | |
| | CAACTTGAAAAAGTGGCACCGAGTCGGTGCATG | |
| | ATCCTGACGACGGAGACCGCCGTCGTCGACAAG | |
| | CCGCCTTTTGGGGT (SEQ ID NO: 1345) | |
| 1346 | GAAACGACCCCAAAAGGCTAGGTTTTAGAGCTA | 3′ pegRNA, transcription |
| | GAAATAGCAAGTTAAAATAAGGCTAGTCCGTTA | adaptation (5′G, |
| | TCAACTTGAAAAAGTGGCACCGAGTCGGTGCAT | 3′TTTTTTT) |
| | GATCCTGACGACGGAGACCGCCGTCGTCGACAA | |
| | GCCGCCTTTTGGGGTTTTTTTT (SEQ ID NO: 1346) | |
| 1347 | AAACGACCCCAAAAGGCTAGGTTTTAGAGCTAG | 3′ pegRNA |
| | AAATAGCAAGTTAAAATAAGGCTAGTCCGTTAT | |
| | CAACTTGAAAAAGTGGCACCGAGTCGGTGCATG | |
| | ATCCTGACGACGGAGACCGCCGTCGTCGACAAG | |
| | CCGCCTTTTGGG (SEQ ID NO: 1347) | |
| 1348 | GAAACGACCCCAAAAGGCTAGGTTTTAGAGCTA | 3′ pegRNA, transcription |
| | GAAATAGCAAGTTAAAATAAGGCTAGTCCGTTA | adaptation (5′G, |
| | TCAACTTGAAAAAGTGGCACCGAGTCGGTGCAT | 3′TTTTTTT) |
| | GATCCTGACGACGGAGACCGCCGTCGTCGACAA | |
| | GCCGCCTTTTGGGTTTTTTT (SEQ ID NO: 1348) | |
| 1349 | AAACGACCCCAAAAGGCTAGGTTTTAGAGCTAG | 3′ pegRNA, transcription |
| | AAATAGCAAGTTAAAATAAGGCTAGTCCGTTAT | adaptation (3′TTTT) |
| | CAACTTGAAAAAGTGGCACCGAGTCGGTGCATG | |
| | ATCCTGACGACGGAGACCGCCGTCGTCGACAAG | |
| | CCGCCTTTTGGGGTTTTT (SEQ ID NO: 1349) | |
| 1350 | AAACGACCCCAAAAGGCTAGGTTTTAGAGCTAG | 3′ pegRNA, transcription |
| | AAATAGCAAGTTAAAATAAGGCTAGTCCGTTAT | adaptation (3′TTTT) |
| | CAACTTGAAAAAGTGGCACCGAGTCGGTGCATG | |
| | ATCCTGACGACGGAGACCGCCGTCGTCGACAAG | |
| | CCGCCTTTTGGGTTTT (SEQ ID NO: 1350) | |

TABLE 31
Exemplary 3′ PEgRNA and component sequence

| Sequence | | |
|---|---|---|
| number | Sequence | Description |
| 1351 | TTATTTATAGGAGAAATACA (SEQ ID NO: 1351) | 3′ Spacer |
| 1352 | TTTATAGGAGAAATACA (SEQ ID NO: 1352) | 3′ Spacer |
| 1353 | ATTTATAGGAGAAATACA (SEQ ID NO: 1353) | 3′ Spacer |
| 1354 | TATTTATAGGAGAAATACA (SEQ ID NO: 1354) | 3′ Spacer |
| 1355 | ATTATTTATAGGAGAAATACA (SEQ ID NO: 1355) | 3′ Spacer |
| 1356 | AATTATTTATAGGAGAAATACA (SEQ ID NO: | 3′ Spacer |
| | 1356) | |
| 1357 | ATTTC | 3′ PBS |
| 1358 | ATTTCT | 3′ PBS |
| 1359 | ATTTCTC | 3′ PBS |
| 1360 | ATTTCTCC | 3′ PBS |
| 1361 | ATTTCTCCT | 3′ PBS |
| 1362 | ATTTCTCCTA (SEQ ID NO: 1362) | 3′ PBS |
| 1363 | ATTTCTCCTAT (SEQ ID NO: 1363) | 3′ PBS |
| 1364 | ATTTCTCCTATA (SEQ ID NO: 1364) | 3′ PBS |
| 1365 | ATTTCTCCTATAA (SEQ ID NO: 1365) | 3′ PBS |
| 1366 | ATTTCTCCTATAAA (SEQ ID NO: 1366) | 3′ PBS |
| 1367 | ATTTCTCCTATAAAT (SEQ ID NO: 1367) | 3′ PBS |
| 1368 | ATTTCTCCTATAAATA (SEQ ID NO: 1368) | 3′ PBS |
| 1369 | ATTTCTCCTATAAATAA (SEQ ID NO: 1369) | 3′ PBS |
| 1370 | ATTTCTCCTATAAATAAT (SEQ ID NO: 1370) | 3′ PBS |
| 1371 | ATTTCTCCTATAAATAATT (SEQ ID NO: 1371) | 3′ PBS |
| 1372 | TTATTTATAGGAGAAATACAGTTTTAGAGCTAGA | 3′ pegRNA |
| | AATAGCAAGTTAAAATAAGGCTAGTCCGTTATC | |
| | AACTTGAAAAAGTGGCACCGAGTCGGTGCATGA | |
| | TCCTGACGACGGAGACCGCCGTCGTCGACAAGC | |
| | CATTTCTCCTATA (SEQ ID NO: 1372) | |
| 1373 | GTTATTTATAGGAGAAATACAGTTTTAGAGCTAG | 3′ pegRNA, transcription |
| | AAATAGCAAGTTAAAATAAGGCTAGTCCGTTAT | adaptation (5′G, |
| | CAACTTGAAAAAGTGGCACCGAGTCGGTGCATG | 3′TTTTTTT) |
| | ATCCTGACGACGGAGACCGCCGTCGTCGACAAG | |
| | CCATTTCTCCTATATTTTTTT (SEQ ID NO: 1373) | |
| 1374 | TTATTTATAGGAGAAATACAGTTTTAGAGCTAGA | 3′ pegRNA |
| | AATAGCAAGTTAAAATAAGGCTAGTCCGTTATC | |
| | AACTTGAAAAAGTGGCACCGAGTCGGTGCATGA | |
| | TCCTGACGACGGAGACCGCCGTCGTCGACAAGC | |
| | CATTTCTCCTA (SEQ ID NO: 1374) | |
| 1375 | GTTATTTATAGGAGAAATACAGTTTTAGAGCTAG | 3′ pegRNA, transcription |
| | AAATAGCAAGTTAAAATAAGGCTAGTCCGTTAT | adaptation (5′G, |
| | CAACTTGAAAAAGTGGCACCGAGTCGGTGCATG | 3′TTTTTTT, 3′A) |
| | ATCCTGACGACGGAGACCGCCGTCGTCGACAAG | |
| | CCATTTCTCCTAATTTTTTT (SEQ ID NO: 1375) | |
| 1377 | TTATTTATAGGAGAAATACAGTTTTAGAGCTAGA | 3′ pegRNA, transcription |
| | AATAGCAAGTTAAAATAAGGCTAGTCCGTTATC | adaptation (3′TTTT) |
| | AACTTGAAAAAGTGGCACCGAGTCGGTGCATGA | |
| | TCCTGACGACGGAGACCGCCGTCGTCGACAAGC | |
| | CATTTCTCCTATATTTT (SEQ ID NO: 1377) | |
| 1378 | TTATTTATAGGAGAAATACAGTTTTAGAGCTAGA | 3′ pegRNA, transcription |
| | AATAGCAAGTTAAAATAAGGCTAGTCCGTTATC | adaptation (3′TTTT) |
| | AACTTGAAAAAGTGGCACCGAGTCGGTGCATGA | |
| | TCCTGACGACGGAGACCGCCGTCGTCGACAAGC | |
| | CATTTCTCCTAATTTT (SEQ ID NO: 1378) | |
| 1379 | TTATTTATAGGAGAAATACAGTTTTAGAGCTAGA | 3′ pegRNA |
| | AATAGCAAGTTAAAATAAGGCTAGTCCGTTATC | |
| | AACTTGAAAAAGTGGCACCGAGTCGGTGCATGA | |
| | TCCTGACGACGGAGACCGCCGTCGTCGACAAGC | |
| | CATTTCTCCTAA (SEQ ID NO: 1379) | |

TABLE 32
Exemplary 3′ PEgRNA and component sequence

| Sequence | | |
|---|---|---|
| number | Sequence | Description |
| 1380 | GCCTGTAATTCCAGCACTTT (SEQ ID NO: 1380) | 3′ Spacer |
| 1381 | TGTAATTCCAGCACTTT (SEQ ID NO: 1381) | 3′ Spacer |
| 1382 | CTGTAATTCCAGCACTTT (SEQ ID NO: 1382) | 3′ Spacer |
| 1383 | CCTGTAATTCCAGCACTTT (SEQ ID NO: 1383) | 3′ Spacer |
| 1384 | CGCCTGTAATTCCAGCACTTT (SEQ ID NO: 1384) | 3′ Spacer |
| 1385 | ACGCCTGTAATTCCAGCACTTT (SEQ ID NO: 1385) | 3′ Spacer |
| 1386 | GTGCT | 3′ PBS |
| 1387 | GTGCTG | 3′ PBS |
| 1388 | GTGCTGG | 3′ PBS |
| 1389 | GTGCTGGA | 3′ PBS |
| 1390 | GTGCTGGAA | 3′ PBS |
| 1391 | GTGCTGGAAT (SEQ ID NO: 1391) | 3′ PBS |
| 1392 | GTGCTGGAATT (SEQ ID NO: 1392) | 3′ PBS |
| 1393 | GTGCTGGAATTA (SEQ ID NO: 1393) | 3′ PBS |
| 1394 | GTGCTGGAATTAC (SEQ ID NO: 1394) | 3′ PBS |
| 1395 | GTGCTGGAATTACA (SEQ ID NO: 1395) | 3′ PBS |
| 1396 | GTGCTGGAATTACAG (SEQ ID NO: 1396) | 3′ PBS |
| 1397 | GTGCTGGAATTACAGG (SEQ ID NO: 1397) | 3′ PBS |
| 1398 | GTGCTGGAATTACAGGC (SEQ ID NO: 1398) | 3′ PBS |
| 1399 | GTGCTGGAATTACAGGCG (SEQ ID NO: 1399) | 3′ PBS |
| 1400 | GTGCTGGAATTACAGGCGT (SEQ ID NO: 1400) | 3′ PBS |
| 1401 | GCCTGTAATTCCAGCACTTTGTTTTAGAGCTAGA | 3′ pegRNA |
| | AATAGCAAGTTAAAATAAGGCTAGTCCGTTATC | |
| | AACTTGAAAAAGTGGCACCGAGTCGGTGCATGA | |
| | TCCTGACGACGGAGACCGCCGTCGTCGACAAGC | |
| | CGTGCTGGAATTA (SEQ ID NO: 1401) | |
| 1402 | GCCTGTAATTCCAGCACTTTGTTTTAGAGCTAGA | 3′ pegRNA, transcription |
| | AATAGCAAGTTAAAATAAGGCTAGTCCGTTATC | adaptation (3′TTTTTTT) |
| | AACTTGAAAAAGTGGCACCGAGTCGGTGCATGA | |
| | TCCTGACGACGGAGACCGCCGTCGTCGACAAGC | |
| | CGTGCTGGAATTATTTTTTT (SEQ ID NO: 1402) | |
| 1403 | GCCTGTAATTCCAGCACTTTGTTTTAGAGCTAGA | 3′ pegRNA |
| | AATAGCAAGTTAAAATAAGGCTAGTCCGTTATC | |
| | AACTTGAAAAAGTGGCACCGAGTCGGTGCATGA | |
| | TCCTGACGACGGAGACCGCCGTCGTCGACAAGC | |
| | CGTGCTGGAAT (SEQ ID NO: 1403) | |
| 1404 | GCCTGTAATTCCAGCACTTTGTTTTAGAGCTAGA | 3′ pegRNA, transcription |
| | AATAGCAAGTTAAAATAAGGCTAGTCCGTTATC | adaptation (3′TTTTTTT) |
| | AACTTGAAAAAGTGGCACCGAGTCGGTGCATGA | |
| | TCCTGACGACGGAGACCGCCGTCGTCGACAAGC | |
| | CGTGCTGGAATTTTTTTT (SEQ ID NO: 1404) | |

TABLE 33
Exemplary 3′ PEgRNA and component sequence

| Sequence | | |
|---|---|---|
| number | Sequence | Description |
| 1405 | GGGTCAATCCAGGACAGTCA (SEQ ID NO: 1405) | 3′ Spacer |
| 1406 | TCAATCCAGGACAGTCA (SEQ ID NO: 1406) | 3′ Spacer |
| 1407 | GTCAATCCAGGACAGTCA (SEQ ID NO: 1407) | 3′ Spacer |
| 1408 | GGTCAATCCAGGACAGTCA (SEQ ID NO: 1408) | 3′ Spacer |
| 1409 | AGGGTCAATCCAGGACAGTCA (SEQ ID NO: 1409) | 3′ Spacer |
| 1410 | TAGGGTCAATCCAGGACAGTCA (SEQ ID NO: | 3′ Spacer |
| | 1410) | |
| 1411 | CTGTC | 3′ PBS |
| 1412 | CTGTCC | 3′ PBS |
| 1413 | CTGTCCT | 3′ PBS |
| 1414 | CTGTCCTG | 3′ PBS |
| 1415 | CTGTCCTGG | 3′ PBS |
| 1416 | CTGTCCTGGA (SEQ ID NO: 1416) | 3′ PBS |
| 1417 | CTGTCCTGGAT (SEQ ID NO: 1417) | 3′ PBS |
| 1418 | CTGTCCTGGATT (SEQ ID NO: 1418) | 3′ PBS |
| 1419 | CTGTCCTGGATTG (SEQ ID NO: 1419) | 3′ PBS |
| 1420 | CTGTCCTGGATTGA (SEQ ID NO: 1420) | 3′ PBS |
| 1421 | CTGTCCTGGATTGAC (SEQ ID NO: 1421) | 3′ PBS |
| 1422 | CTGTCCTGGATTGACC (SEQ ID NO: 1422) | 3′ PBS |
| 1423 | CTGTCCTGGATTGACCC (SEQ ID NO: 1423) | 3′ PBS |
| 1424 | CTGTCCTGGATTGACCCT (SEQ ID NO: 1424) | 3′ PBS |
| 1425 | CTGTCCTGGATTGACCCTA (SEQ ID NO: 1425) | 3′ PBS |
| 1426 | GGGTCAATCCAGGACAGTCAGTTTTAGAGCTAG | 3′ pegRNA |
| | AAATAGCAAGTTAAAATAAGGCTAGTCCGTTAT | |
| | CAACTTGAAAAAGTGGCACCGAGTCGGTGCATG | |
| | ATCCTGACGACGGAGACCGCCGTCGTCGACAAG | |
| | CCCTGTCCTGGATT (SEQ ID NO: 1426) | |
| 1427 | GGGTCAATCCAGGACAGTCAGTTTTAGAGCTAG | 3′ pegRNA, transcription |
| | AAATAGCAAGTTAAAATAAGGCTAGTCCGTTAT | adaptation (3′TTTTTTT) |
| | CAACTTGAAAAAGTGGCACCGAGTCGGTGCATG | |
| | ATCCTGACGACGGAGACCGCCGTCGTCGACAAG | |
| | CCCTGTCCTGGATTTTTTTTT (SEQ ID NO: 1427) | |
| 1428 | GGGTCAATCCAGGACAGTCAGTTTTAGAGCTAG | 3′ pegRNA |
| | AAATAGCAAGTTAAAATAAGGCTAGTCCGTTAT | |
| | CAACTTGAAAAAGTGGCACCGAGTCGGTGCATG | |
| | ATCCTGACGACGGAGACCGCCGTCGTCGACAAG | |
| | CCCTGTCCTGGA (SEQ ID NO: 1428) | |
| 1429 | GGGTCAATCCAGGACAGTCAGTTTTAGAGCTAG | 3′ pegRNA, transcription |
| | AAATAGCAAGTTAAAATAAGGCTAGTCCGTTAT | adaptation (3′TTTTTTT) |
| | CAACTTGAAAAAGTGGCACCGAGTCGGTGCATG | |
| | ATCCTGACGACGGAGACCGCCGTCGTCGACAAG | |
| | CCCTGTCCTGGATTTTTTT (SEQ ID NO: 1429) | |

TABLE 34
Exemplary 3′ PEgRNA and component sequence

| Sequence | | |
|---|---|---|
| number | Sequence | Description |
| 1430 | GGTCTCAAACTCCTGACCTC (SEQ ID NO: 1430) | 3′ Spacer |
| 1431 | CTCAAACTCCTGACCTC (SEQ ID NO: 1431) | 3′ Spacer |
| 1432 | TCTCAAACTCCTGACCTC (SEQ ID NO: 1432) | 3′ Spacer |
| 1433 | GTCTCAAACTCCTGACCTC (SEQ ID NO: 1433) | 3′ Spacer |
| 1434 | TGGTCTCAAACTCCTGACCTC (SEQ ID NO: 1434) | 3′ Spacer |
| 1435 | CTGGTCTCAAACTCCTGACCTC (SEQ ID NO: 1435) | 3′ Spacer |
| 1436 | GTCAG | 3′ PBS |
| 1437 | GTCAGG | 3′ PBS |
| 1438 | GTCAGGA | 3′ PBS |
| 1439 | GTCAGGAG | 3′ PBS |
| 1440 | GTCAGGAGT | 3′ PBS |
| 1441 | GTCAGGAGTT (SEQ ID NO: 1441) | 3′ PBS |
| 1442 | GTCAGGAGTTT (SEQ ID NO: 1442) | 3′ PBS |
| 1443 | GTCAGGAGTTTG (SEQ ID NO: 1443) | 3′ PBS |
| 1444 | GTCAGGAGTTTGA (SEQ ID NO: 1444) | 3′ PBS |
| 1445 | GTCAGGAGTTTGAG (SEQ ID NO: 1445) | 3′ PBS |
| 1446 | GTCAGGAGTTTGAGA (SEQ ID NO: 1446) | 3′ PBS |
| 1447 | GTCAGGAGTTTGAGAC (SEQ ID NO: 1447) | 3′ PBS |
| 1448 | GTCAGGAGTTTGAGACC (SEQ ID NO: 1448) | 3′ PBS |
| 1449 | GTCAGGAGTTTGAGACCA (SEQ ID NO: 1449) | 3′ PBS |
| 1450 | GTCAGGAGTTTGAGACCAG (SEQ ID NO: 1450) | 3′ PBS |
| 1451 | GGTCTCAAACTCCTGACCTCGTTTTAGAGCTAGA | 3′ pegRNA |
| | AATAGCAAGTTAAAATAAGGCTAGTCCGTTATC | |
| | AACTTGAAAAAGTGGCACCGAGTCGGTGCATGA | |
| | TCCTGACGACGGAGACCGCCGTCGTCGACAAGC | |
| | CGTCAGGAGTTTG (SEQ ID NO: 1451) | |
| 1452 | GGTCTCAAACTCCTGACCTCGTTTTAGAGCTAGA | 3′ pegRNA, transcription |
| | AATAGCAAGTTAAAATAAGGCTAGTCCGTTATC | adaptation (3′TTTTTTT) |
| | AACTTGAAAAAGTGGCACCGAGTCGGTGCATGA | |
| | TCCTGACGACGGAGACCGCCGTCGTCGACAAGC | |
| | CGTCAGGAGTTTGTTTTTTT (SEQ ID NO: 1452) | |
| 1453 | GGTCTCAAACTCCTGACCTCGTTTTAGAGCTAGA | 3′ pegRNA |
| | AATAGCAAGTTAAAATAAGGCTAGTCCGTTATC | |
| | AACTTGAAAAAGTGGCACCGAGTCGGTGCATGA | |
| | TCCTGACGACGGAGACCGCCGTCGTCGACAAGC | |
| | CGTCAGGAGTT (SEQ ID NO: 1453) | |
| 1454 | GGTCTCAAACTCCTGACCTCGTTTTAGAGCTAGA | 3′ pegRNA, transcription |
| | AATAGCAAGTTAAAATAAGGCTAGTCCGTTATC | adaptation (3′TTTTTTT) |
| | AACTTGAAAAAGTGGCACCGAGTCGGTGCATGA | |
| | TCCTGACGACGGAGACCGCCGTCGTCGACAAGC | |
| | CGTCAGGAGTTTTTTTTT (SEQ ID NO: 1454) | |

TABLE 35
Exemplary 3′ PEgRNA and component sequence

| Sequence | | |
|---|---|---|
| number | Sequence | Description |
| 1455 | TCATGGGAGTGAAACTAGTT (SEQ ID NO: 1455) | 3′ Spacer |
| 1456 | TGGGAGTGAAACTAGTT (SEQ ID NO: 1456) | 3′ Spacer |
| 1457 | ATGGGAGTGAAACTAGTT (SEQ ID NO: 1457) | 3′ Spacer |
| 1458 | CATGGGAGTGAAACTAGTT (SEQ ID NO: 1458) | 3′ Spacer |
| 1459 | ATCATGGGAGTGAAACTAGTT (SEQ ID NO: 1459) | 3′ Spacer |
| 1460 | TATCATGGGAGTGAAACTAGTT (SEQ ID NO: 1460) | 3′ Spacer |
| 1461 | TAGTT | 3′ PBS |
| 1462 | TAGTTT | 3′ PBS |
| 1463 | TAGTTTC | 3′ PBS |
| 1464 | TAGTTTCA | 3′ PBS |
| 1465 | TAGTTTCAC | 3′ PBS |
| 1466 | TAGTTTCACT (SEQ ID NO: 1466) | 3′ PBS |
| 1467 | TAGTTTCACTC (SEQ ID NO: 1467) | 3′ PBS |
| 1468 | TAGTTTCACTCC (SEQ ID NO: 1468) | 3′ PBS |
| 1469 | TAGTTTCACTCCC (SEQ ID NO: 1469) | 3′ PBS |
| 1470 | TAGTTTCACTCCCA (SEQ ID NO: 1470) | 3′ PBS |
| 1471 | TAGTTTCACTCCCAT (SEQ ID NO: 1471) | 3′ PBS |
| 1472 | TAGTTTCACTCCCATG (SEQ ID NO: 1472) | 3′ PBS |
| 1473 | TAGTTTCACTCCCATGA (SEQ ID NO: 1473) | 3′ PBS |
| 1474 | TAGTTTCACTCCCATGAT (SEQ ID NO: 1474) | 3′ PBS |
| 1475 | TAGTTTCACTCCCATGATA (SEQ ID NO: 1475) | 3′ PBS |
| 1476 | TCATGGGAGTGAAACTAGTTGTTTTAGAGCTAG | 3′ pegRNA |
| | AAATAGCAAGTTAAAATAAGGCTAGTCCGTTAT | |
| | CAACTTGAAAAAGTGGCACCGAGTCGGTGCATG | |
| | ATCCTGACGACGGAGACCGCCGTCGTCGACAAG | |
| | CCTAGTTTCACTCC (SEQ ID NO: 1476) | |
| 1477 | GTCATGGGAGTGAAACTAGTTGTTTTAGAGCTA | 3′ pegRNA, transcription |
| | GAAATAGCAAGTTAAAATAAGGCTAGTCCGTTA | adaptation (5′G, |
| | TCAACTTGAAAAAGTGGCACCGAGTCGGTGCAT | 3′TTTTTTT) |
| | GATCCTGACGACGGAGACCGCCGTCGTCGACAA | |
| | GCCTAGTTTCACTCCTTTTTTT | |
| | (SEQ ID NO: 1477) | |
| 1478 | TCATGGGAGTGAAACTAGTTGTTTTAGAGCTAG | 3′ pegRNA |
| | AAATAGCAAGTTAAAATAAGGCTAGTCCGTTAT | |
| | CAACTTGAAAAAGTGGCACCGAGTCGGTGCATG | |
| | ATCCTGACGACGGAGACCGCCGTCGTCGACAAG | |
| | CCTAGTTTCACT (SEQ ID NO: 1478) | |
| 1479 | GTCATGGGAGTGAAACTAGTTGTTTTAGAGCTA | 3′ pegRNA, transcription |
| | GAAATAGCAAGTTAAAATAAGGCTAGTCCGTTA | adaptation (5′G, |
| | TCAACTTGAAAAAGTGGCACCGAGTCGGTGCAT | 3′TTTTTTT) |
| | GATCCTGACGACGGAGACCGCCGTCGTCGACAA | |
| | GCCTAGTTTCACTTTTTTTT | |
| | (SEQ ID NO: 1479) | |

TABLE 36
Exemplary 3′ PERNA and component sequence

| Sequence | | |
|---|---|---|
| number | Sequence | Description |
| 1480 | TGTGGCAGTATTGAGAGGTG (SEQ ID NO: 1480) | 3′ Spacer |
| 1481 | GGCAGTATTGAGAGGTG (SEQ ID NO: 1481) | 3′ Spacer |
| 1482 | TGGCAGTATTGAGAGGTG (SEQ ID NO: 1482) | 3′ Spacer |
| 1483 | GTGGCAGTATTGAGAGGTG (SEQ ID NO: 1483) | 3′ Spacer |
| 1484 | ATGTGGCAGTATTGAGAGGTG (SEQ ID NO: 1484) | 3′ Spacer |
| 1485 | GATGTGGCAGTATTGAGAGGTG (SEQ ID NO: | 3′ Spacer |
| | 1485) | |
| 1486 | CTCTC | 3′ PBS |
| 1487 | CTCTCA | 3′ PBS |
| 1488 | CTCTCAA | 3′ PBS |
| 1489 | CTCTCAAT | 3′ PBS |
| 1490 | CTCTCAATA | 3′ PBS |
| 1491 | CTCTCAATAC (SEQ ID NO: 1491) | 3′ PBS |
| 1492 | CTCTCAATACT (SEQ ID NO: 1492) | 3′ PBS |
| 1493 | CTCTCAATACTG (SEQ ID NO: 1493) | 3′ PBS |
| 1494 | CTCTCAATACTGC (SEQ ID NO: 1494) | 3′ PBS |
| 1495 | CTCTCAATACTGCC (SEQ ID NO: 1495) | 3′ PBS |
| 1496 | CTCTCAATACTGCCA (SEQ ID NO: 1496) | 3′ PBS |
| 1497 | CTCTCAATACTGCCAC (SEQ ID NO: 1497) | 3′ PBS |
| 1498 | CTCTCAATACTGCCACA (SEQ ID NO: 1498) | 3′ PBS |
| 1499 | CTCTCAATACTGCCACAT (SEQ ID NO: 1499) | 3′ PBS |
| 1500 | CTCTCAATACTGCCACATC (SEQ ID NO: 1500) | 3′ PBS |
| 1501 | TGTGGCAGTATTGAGAGGTGGTTTTAGAGCTAG | 3′ pegRNA |
| | AAATAGCAAGTTAAAATAAGGCTAGTCCGTTAT | |
| | CAACTTGAAAAAGTGGCACCGAGTCGGTGCATG | |
| | ATCCTGACGACGGAGACCGCCGTCGTCGACAAG | |
| | CCCTCTCAATACTG (SEQ ID NO: 1501) | |
| 1502 | GTGTGGCAGTATTGAGAGGTGGTTTTAGAGCTA | 3′ pegRNA, transcription |
| | GAAATAGCAAGTTAAAATAAGGCTAGTCCGTTA | adaptation (5′G, |
| | TCAACTTGAAAAAGTGGCACCGAGTCGGTGCAT | 3′TTTTTTT) |
| | GATCCTGACGACGGAGACCGCCGTCGTCGACAA | |
| | GCCCTCTCAATACTGTTTTTTT (SEQ ID NO: 1502) | |
| 1503 | TGTGGCAGTATTGAGAGGTGGTTTTAGAGCTAG | 3′ pegRNA |
| | AAATAGCAAGTTAAAATAAGGCTAGTCCGTTAT | |
| | CAACTTGAAAAAGTGGCACCGAGTCGGTGCATG | |
| | ATCCTGACGACGGAGACCGCCGTCGTCGACAAG | |
| | CCCTCTCAATAC (SEQ ID NO: 1503) | |
| 1504 | GTGTGGCAGTATTGAGAGGTGGTTTTAGAGCTA | 3′ pegRNA, transcription |
| | GAAATAGCAAGTTAAAATAAGGCTAGTCCGTTA | adaptation (5′G, |
| | TCAACTTGAAAAAGTGGCACCGAGTCGGTGCAT | 3′TTTTTTT) |
| | GATCCTGACGACGGAGACCGCCGTCGTCGACAA | |
| | GCCCTCTCAATACTTTTTTT (SEQ ID NO: 1504) | |

TABLE 37
Exemplary 3′ PEgRNA and component sequence

| Sequence | | |
|---|---|---|
| number | Sequence | Description |
| 1505 | GTCTTGTCCCTCTAGGAAAA (SEQ ID NO: 1505) | 3′ Spacer |
| 1506 | TTGTCCCTCTAGGAAAA (SEQ ID NO: 1506) | 3′ Spacer |
| 1507 | CTTGTCCCTCTAGGAAAA (SEQ ID NO: 1507) | 3′ Spacer |
| 1508 | TCTTGTCCCTCTAGGAAAA (SEQ ID NO: 1508) | 3′ Spacer |
| 1509 | GGTCTTGTCCCTCTAGGAAAA (SEQ ID NO: 1509) | 3′ Spacer |
| 1510 | TGGTCTTGTCCCTCTAGGAAAA (SEQ ID NO: | 3′ Spacer |
| | 1510) | |
| 428 | TCCTA | 3′ PBS |
| 429 | TCCTAG | 3′ PBS |
| 1511 | TCCTAGA | 3′ PBS |
| 1512 | TCCTAGAG | 3′ PBS |
| 1513 | TCCTAGAGG | 3′ PBS |
| 1514 | TCCTAGAGGG (SEQ ID NO: 1514) | 3′ PBS |
| 1515 | TCCTAGAGGGA (SEQ ID NO: 1515) | 3′ PBS |
| 1516 | TCCTAGAGGGAC (SEQ ID NO: 1516) | 3′ PBS |
| 1517 | TCCTAGAGGGACA (SEQ ID NO: 1517) | 3′ PBS |
| 1518 | TCCTAGAGGGACAA (SEQ ID NO: 1518) | 3′ PBS |
| 1519 | TCCTAGAGGGACAAG (SEQ ID NO: 1519) | 3′ PBS |
| 1520 | TCCTAGAGGGACAAGA (SEQ ID NO: 1520) | 3′ PBS |
| 1521 | TCCTAGAGGGACAAGAC (SEQ ID NO: 1521) | 3′ PBS |
| 1522 | TCCTAGAGGGACAAGACC (SEQ ID NO: 1522) | 3′ PBS |
| 1523 | TCCTAGAGGGACAAGACCA (SEQ ID NO: 1523) | 3′ PBS |
| 1524 | GTCTTGTCCCTCTAGGAAAAGTTTTAGAGCTAGA | 3′ pegRNA |
| | AATAGCAAGTTAAAATAAGGCTAGTCCGTTATC | |
| | AACTTGAAAAAGTGGCACCGAGTCGGTGCATGA | |
| | TCCTGACGACGGAGACCGCCGTCGTCGACAAGC | |
| | CTCCTAGAGGGAC (SEQ ID NO: 1524) | |
| 1525 | GTCTTGTCCCTCTAGGAAAAGTTTTAGAGCTAGA | 3′ pegRNA, transcription |
| | AATAGCAAGTTAAAATAAGGCTAGTCCGTTATC | adaptation (3′TTTTTTT) |
| | AACTTGAAAAAGTGGCACCGAGTCGGTGCATGA | |
| | TCCTGACGACGGAGACCGCCGTCGTCGACAAGC | |
| | CTCCTAGAGGGACTTTTTTT (SEQ ID NO: 1525) | |
| 1526 | GTCTTGTCCCTCTAGGAAAAGTTTTAGAGCTAGA | 3′ pegRNA |
| | AATAGCAAGTTAAAATAAGGCTAGTCCGTTATC | |
| | AACTTGAAAAAGTGGCACCGAGTCGGTGCATGA | |
| | TCCTGACGACGGAGACCGCCGTCGTCGACAAGC | |
| | CTCCTAGAGGG (SEQ ID NO: 1526) | |
| 1527 | GTCTTGTCCCTCTAGGAAAAGTTTTAGAGCTAGA | 3′ pegRNA, transcription |
| | AATAGCAAGTTAAAATAAGGCTAGTCCGTTATC | adaptation (3′TTTTTTT) |
| | AACTTGAAAAAGTGGCACCGAGTCGGTGCATGA | |
| | TCCTGACGACGGAGACCGCCGTCGTCGACAAGC | |
| | CTCCTAGAGGGTTTTTTT (SEQ ID NO: 1527) | |

TABLE 38
Exemplary 3′ PEgRNA and component sequence

| Sequence | | |
|---|---|---|
| number | Sequence | Description |
| 1528 | TTGTTAGGCCTAAAGCCAAA (SEQ ID NO: 1528) | 3′ Spacer |
| 1529 | TTAGGCCTAAAGCCAAA (SEQ ID NO: 1529) | 3′ Spacer |
| 1530 | GTTAGGCCTAAAGCCAAA (SEQ ID NO: 1530) | 3′ Spacer |
| 1531 | TGTTAGGCCTAAAGCCAAA (SEQ ID NO: 1531) | 3′ Spacer |
| 1532 | CTTGTTAGGCCTAAAGCCAAA (SEQ ID NO: 1532) | 3′ Spacer |
| 1533 | GCTTGTTAGGCCTAAAGCCAAA (SEQ ID NO: | 3′ Spacer |
| | 1533) | |
| 1534 | GGCTT | 3′ PBS |
| 1535 | GGCTTT | 3′ PBS |
| 1536 | GGCTTTA | 3′ PBS |
| 1537 | GGCTTTAG | 3′ PBS |
| 1538 | GGCTTTAGG | 3′ PBS |
| 1539 | GGCTTTAGGC (SEQ ID NO: 1539) | 3′ PBS |
| 1540 | GGCTTTAGGCC (SEQ ID NO: 1540) | 3′ PBS |
| 1541 | GGCTTTAGGCCT (SEQ ID NO: 1541) | 3′ PBS |
| 1542 | GGCTTTAGGCCTA (SEQ ID NO: 1542) | 3′ PBS |
| 1543 | GGCTTTAGGCCTAA (SEQ ID NO: 1543) | 3′ PBS |
| 1544 | GGCTTTAGGCCTAAC (SEQ ID NO: 1544) | 3′ PBS |
| 1545 | GGCTTTAGGCCTAACA (SEQ ID NO: 1545) | 3′ PBS |
| 1546 | GGCTTTAGGCCTAACAA (SEQ ID NO: 1546) | 3′ PBS |
| 1547 | GGCTTTAGGCCTAACAAG (SEQ ID NO: 1547) | 3′ PBS |
| 1548 | GGCTTTAGGCCTAACAAGC (SEQ ID NO: 1548) | 3′ PBS |
| 1549 | TTGTTAGGCCTAAAGCCAAAGTTTTAGAGCTAG | 3′ pegRNA |
| | AAATAGCAAGTTAAAATAAGGCTAGTCCGTTAT | |
| | CAACTTGAAAAAGTGGCACCGAGTCGGTGCATG | |
| | ATCCTGACGACGGAGACCGCCGTCGTCGACAAG | |
| | CCGGCTTTAGGCCT (SEQ ID NO: 1549) | |
| 1550 | GTTGTTAGGCCTAAAGCCAAAGTTTTAGAGCTA | 3′ pegRNA, transcription |
| | GAAATAGCAAGTTAAAATAAGGCTAGTCCGTTA | adaptation (5′G, |
| | TCAACTTGAAAAAGTGGCACCGAGTCGGTGCAT | 3′TTTTTTT) |
| | GATCCTGACGACGGAGACCGCCGTCGTCGACAA | |
| | GCCGGCTTTAGGCCTTTTTTTT (SEQ ID NO: 1550) | |
| 1551 | TTGTTAGGCCTAAAGCCAAAGTTTTAGAGCTAG | 3′ pegRNA |
| | AAATAGCAAGTTAAAATAAGGCTAGTCCGTTAT | |
| | CAACTTGAAAAAGTGGCACCGAGTCGGTGCATG | |
| | ATCCTGACGACGGAGACCGCCGTCGTCGACAAG | |
| | CCGGCTTTAGGC (SEQ ID NO: 1551) | |
| 1552 | GTTGTTAGGCCTAAAGCCAAAGTTTTAGAGCTA | 3′ pegRNA, transcription |
| | GAAATAGCAAGTTAAAATAAGGCTAGTCCGTTA | adaptation (5′G, |
| | TCAACTTGAAAAAGTGGCACCGAGTCGGTGCAT | 3′TTTTTTT) |
| | GATCCTGACGACGGAGACCGCCGTCGTCGACAA | |
| | GCCGGCTTTAGGCTTTTTTT (SEQ ID NO: 1552) | |

TABLE 39
Exemplary 3′ PERNA and component sequence

| Sequence | | |
|---|---|---|
| number | Sequence | Description |
| 1553 | CAGTGATGGGGTGAAGACAA (SEQ ID NO: 1553) | 3′ Spacer |
| 1554 | TGATGGGGTGAAGACAA (SEQ ID NO: 1554) | 3′ Spacer |
| 1555 | GTGATGGGGTGAAGACAA (SEQ ID NO: 1555) | 3′ Spacer |
| 1556 | AGTGATGGGGTGAAGACAA (SEQ ID NO: 1556) | 3′ Spacer |
| 1557 | GCAGTGATGGGGTGAAGACAA (SEQ ID NO: 1557) | 3′ Spacer |
| 1558 | GGCAGTGATGGGGTGAAGACAA (SEQ ID NO: 1558) | 3′ Spacer |
| 1559 | TCTTC | 3′ PBS |
| 1560 | TCTTCA | 3′ PBS |
| 1561 | TCTTCAC | 3′ PBS |
| 1562 | TCTTCACC | 3′ PBS |
| 1563 | TCTTCACCC | 3′ PBS |
| 1564 | TCTTCACCCC (SEQ ID NO: 1564) | 3′ PBS |
| 1565 | TCTTCACCCCA (SEQ ID NO: 1565) | 3′ PBS |
| 1566 | TCTTCACCCCAT (SEQ ID NO: 1566) | 3′ PBS |
| 1567 | TCTTCACCCCATC (SEQ ID NO: 1567) | 3′ PBS |
| 1568 | TCTTCACCCCATCA (SEQ ID NO: 1568) | 3′ PBS |
| 1569 | TCTTCACCCCATCAC (SEQ ID NO: 1569) | 3′ PBS |
| 1570 | TCTTCACCCCATCACT (SEQ ID NO: 1570) | 3′ PBS |
| 1571 | TCTTCACCCCATCACTG (SEQ ID NO: 1571) | 3′ PBS |
| 1572 | TCTTCACCCCATCACTGC (SEQ ID NO: 1572) | 3′ PBS |
| 1573 | TCTTCACCCCATCACTGCC (SEQ ID NO: 1573) | 3′ PBS |
| 1574 | CAGTGATGGGGTGAAGACAAGTTTTAGAGCTAG | 3′ pegRNA |
| | AAATAGCAAGTTAAAATAAGGCTAGTCCGTTAT | |
| | CAACTTGAAAAAGTGGCACCGAGTCGGTGCATG | |
| | ATCCTGACGACGGAGACCGCCGTCGTCGACAAG | |
| | CCTCTTCACCCCAT (SEQ ID NO: 1574) | |
| 1575 | GCAGTGATGGGGTGAAGACAAGTTTTAGAGCTA | 3′ pegRNA, transcription |
| | GAAATAGCAAGTTAAAATAAGGCTAGTCCGTTA | adaptation (5′G, |
| | TCAACTTGAAAAAGTGGCACCGAGTCGGTGCAT | 3′TTTTTTT) |
| | GATCCTGACGACGGAGACCGCCGTCGTCGACAA | |
| | GCCTCTTCACCCCATTTTTTTT (SEQ ID NO: 1575) | |
| 1576 | CAGTGATGGGGTGAAGACAAGTTTTAGAGCTAG | 3′ pegRNA |
| | AAATAGCAAGTTAAAATAAGGCTAGTCCGTTAT | |
| | CAACTTGAAAAAGTGGCACCGAGTCGGTGCATG | |
| | ATCCTGACGACGGAGACCGCCGTCGTCGACAAG | |
| | CCTCTTCACCCC (SEQ ID NO: 1576) | |
| 1577 | GCAGTGATGGGGTGAAGACAAGTTTTAGAGCTA | 3′ pegRNA, transcription |
| | GAAATAGCAAGTTAAAATAAGGCTAGTCCGTTA | adaptation (5′G, |
| | TCAACTTGAAAAAGTGGCACCGAGTCGGTGCAT | 3′TTTTTTT) |
| | GATCCTGACGACGGAGACCGCCGTCGTCGACAA | |
| | GCCTCTTCACCCCTTTTTTT (SEQ ID NO: 1577) | |

TABLE 40
Exemplary 3′ PEgRNA and component sequence

| Sequence | | |
|---|---|---|
| number | Sequence | Description |
| 1578 | TTCTGAGAAATTCACCTGAA (SEQ ID NO: 1578) | 3′ Spacer |
| 1579 | TGAGAAATTCACCTGAA (SEQ ID NO: 1579) | 3′ Spacer |
| 1580 | CTGAGAAATTCACCTGAA (SEQ ID NO: 1580) | 3′ Spacer |
| 1581 | TCTGAGAAATTCACCTGAA (SEQ ID NO: 1581) | 3′ Spacer |
| 1582 | ATTCTGAGAAATTCACCTGAA (SEQ ID NO: 1582) | 3′ Spacer |
| 1583 | CATTCTGAGAAATTCACCTGAA (SEQ ID NO: | 3′ Spacer |
| | 1583) | |
| 1584 | AGGTG | 3′ PBS |
| 1585 | AGGTGA | 3′ PBS |
| 1586 | AGGTGAA | 3′ PBS |
| 1587 | AGGTGAAT | 3′ PBS |
| 1588 | AGGTGAATT | 3′ PBS |
| 1589 | AGGTGAATTT (SEQ ID NO: 1589) | 3′ PBS |
| 1590 | AGGTGAATTTC (SEQ ID NO: 1590) | 3′ PBS |
| 1591 | AGGTGAATTTCT (SEQ ID NO: 1591) | 3′ PBS |
| 1592 | AGGTGAATTTCTC (SEQ ID NO: 1592) | 3′ PBS |
| 1593 | AGGTGAATTTCTCA (SEQ ID NO: 1593) | 3′ PBS |
| 1594 | AGGTGAATTTCTCAG (SEQ ID NO: 1594) | 3′ PBS |
| 1595 | AGGTGAATTTCTCAGA (SEQ ID NO: 1595) | 3′ PBS |
| 1596 | AGGTGAATTTCTCAGAA (SEQ ID NO: 1596) | 3′ PBS |
| 1597 | AGGTGAATTTCTCAGAAT (SEQ ID NO: 1597) | 3′ PBS |
| 1598 | AGGTGAATTTCTCAGAATG (SEQ ID NO: 1598) | 3′ PBS |
| 1599 | TTCTGAGAAATTCACCTGAAGTTTTAGAGCTAGA | 3′ pegRNA |
| | AATAGCAAGTTAAAATAAGGCTAGTCCGTTATC | |
| | AACTTGAAAAAGTGGCACCGAGTCGGTGCATGA | |
| | TCCTGACGACGGAGACCGCCGTCGTCGACAAGC | |
| | CAGGTGAATTTCT (SEQ ID NO: 1599) | |
| 1600 | GTTCTGAGAAATTCACCTGAAGTTTTAGAGCTAG | 3′ pegRNA, transcription |
| | AAATAGCAAGTTAAAATAAGGCTAGTCCGTTAT | adaptation (5′G, |
| | CAACTTGAAAAAGTGGCACCGAGTCGGTGCATG | 3′TTTTTTT) |
| | ATCCTGACGACGGAGACCGCCGTCGTCGACAAG | |
| | CCAGGTGAATTTCTTTTTTTT (SEQ ID NO: 1600) | |
| 1601 | TTCTGAGAAATTCACCTGAAGTTTTAGAGCTAGA | 3′ pegRNA |
| | AATAGCAAGTTAAAATAAGGCTAGTCCGTTATC | |
| | AACTTGAAAAAGTGGCACCGAGTCGGTGCATGA | |
| | TCCTGACGACGGAGACCGCCGTCGTCGACAAGC | |
| | CAGGTGAATTT (SEQ ID NO: 1601) | |
| 1602 | GTTCTGAGAAATTCACCTGAAGTTTTAGAGCTAG | 3′ pegRNA, transcription |
| | AAATAGCAAGTTAAAATAAGGCTAGTCCGTTAT | adaptation (5′G, |
| | CAACTTGAAAAAGTGGCACCGAGTCGGTGCATG | 3′TTTTTTT) |
| | ATCCTGACGACGGAGACCGCCGTCGTCGACAAG | |
| | CCAGGTGAATTTTTTTTTT (SEQ ID NO: 1602) | |

TABLE 41
Exemplary 3′ PEgRNA and component sequence

| Sequence | | |
|---|---|---|
| number | Sequence | Description |
| 1603 | GGAGCCCAGCTTTCCTTCCC (SEQ ID NO: 1603) | 3′ Spacer |
| 1604 | GCCCAGCTTTCCTTCCC (SEQ ID NO: 1604) | 3′ Spacer |
| 1605 | AGCCCAGCTTTCCTTCCC (SEQ ID NO: 1605) | 3′ Spacer |
| 1606 | GAGCCCAGCTTTCCTTCCC (SEQ ID NO: 1606) | 3′ Spacer |
| 1607 | GGGAGCCCAGCTTTCCTTCCC (SEQ ID NO: 1607) | 3′ Spacer |
| 1608 | AGGGAGCCCAGCTTTCCTTCCC (SEQ ID NO: | 3′ Spacer |
| | 1608) | |
| 1609 | AAGGA | 3′ PBS |
| 1610 | AAGGAA | 3′ PBS |
| 1611 | AAGGAAA | 3′ PBS |
| 1612 | AAGGAAAG | 3′ PBS |
| 1613 | AAGGAAAGC | 3′ PBS |
| 1614 | AAGGAAAGCT (SEQ ID NO: 1614) | 3′ PBS |
| 1615 | AAGGAAAGCTG (SEQ ID NO: 1615) | 3′ PBS |
| 1616 | AAGGAAAGCTGG (SEQ ID NO: 1616) | 3′ PBS |
| 1617 | AAGGAAAGCTGGG (SEQ ID NO: 1617) | 3′ PBS |
| 1618 | AAGGAAAGCTGGGC (SEQ ID NO: 1618) | 3′ PBS |
| 1619 | AAGGAAAGCTGGGCT (SEQ ID NO: 1619) | 3′ PBS |
| 1620 | AAGGAAAGCTGGGCTC (SEQ ID NO: 1620) | 3′ PBS |
| 1621 | AAGGAAAGCTGGGCTCC (SEQ ID NO: 1621) | 3′ PBS |
| 1622 | AAGGAAAGCTGGGCTCCC (SEQ ID NO: 1622) | 3′ PBS |
| 1623 | AAGGAAAGCTGGGCTCCCT (SEQ ID NO: 1623) | 3′ PBS |
| 1624 | GGAGCCCAGCTTTCCTTCCCGTTTTAGAGCTAGA | 3′ pegRNA |
| | AATAGCAAGTTAAAATAAGGCTAGTCCGTTATC | |
| | AACTTGAAAAAGTGGCACCGAGTCGGTGCATGA | |
| | TCCTGACGACGGAGACCGCCGTCGTCGACAAGC | |
| | CAAGGAAAGCTGG (SEQ ID NO: 1624) | |
| 1625 | GGAGCCCAGCTTTCCTTCCCGTTTTAGAGCTAGA | 3′ pegRNA, transcription |
| | AATAGCAAGTTAAAATAAGGCTAGTCCGTTATC | adaptation (3′TTTTTTT) |
| | AACTTGAAAAAGTGGCACCGAGTCGGTGCATGA | |
| | TCCTGACGACGGAGACCGCCGTCGTCGACAAGC | |
| | CAAGGAAAGCTGGTTTTTTT (SEQ ID NO: 1625) | |
| 1626 | GGAGCCCAGCTTTCCTTCCCGTTTTAGAGCTAGA | 3′ pegRNA |
| | AATAGCAAGTTAAAATAAGGCTAGTCCGTTATC | |
| | AACTTGAAAAAGTGGCACCGAGTCGGTGCATGA | |
| | TCCTGACGACGGAGACCGCCGTCGTCGACAAGC | |
| | CAAGGAAAGCT (SEQ ID NO: 1626) | |
| 1627 | GGAGCCCAGCTTTCCTTCCCGTTTTAGAGCTAGA | 3′ pegRNA, transcription |
| | AATAGCAAGTTAAAATAAGGCTAGTCCGTTATC | adaptation (3′TTTTTTT) |
| | AACTTGAAAAAGTGGCACCGAGTCGGTGCATGA | |
| | TCCTGACGACGGAGACCGCCGTCGTCGACAAGC | |
| | CAAGGAAAGCTTTTTTTT (SEQ ID NO: 1627) | |

TABLE 42
Exemplary 3′ PEgRNA and component sequence

| Sequence | | |
|---|---|---|
| number | Sequence | Description |
| 1628 | GAGGCAAAGCTTGGAGGTCA (SEQ ID NO: 1628) | 3′ Spacer |
| 1629 | GCAAAGCTTGGAGGTCA (SEQ ID NO: 1629) | 3′ Spacer |
| 1630 | GGCAAAGCTTGGAGGTCA (SEQ ID NO: 1630) | 3′ Spacer |
| 1631 | AGGCAAAGCTTGGAGGTCA (SEQ ID NO: 1631) | 3′ Spacer |
| 1632 | GGAGGCAAAGCTTGGAGGTCA (SEQ ID NO: 1632) | 3′ Spacer |
| 1633 | GGGAGGCAAAGCTTGGAGGTCA (SEQ ID NO: | 3′ Spacer |
| | 1633) | |
| 1634 | CCTCC | 3′ PBS |
| 1635 | CCTCCA | 3′ PBS |
| 1636 | CCTCCAA | 3′ PBS |
| 1637 | CCTCCAAG | 3′ PBS |
| 1638 | CCTCCAAGC | 3′ PBS |
| 1639 | CCTCCAAGCT (SEQ ID NO: 1639) | 3′ PBS |
| 1640 | CCTCCAAGCTT (SEQ ID NO: 1640) | 3′ PBS |
| 1641 | CCTCCAAGCTTT (SEQ ID NO: 1641) | 3′ PBS |
| 1642 | CCTCCAAGCTTTG (SEQ ID NO: 1642) | 3′ PBS |
| 1643 | CCTCCAAGCTTTGC (SEQ ID NO: 1643) | 3′ PBS |
| 1644 | CCTCCAAGCTTTGCC (SEQ ID NO: 1644) | 3′ PBS |
| 1645 | CCTCCAAGCTTTGCCT (SEQ ID NO: 1645) | 3′ PBS |
| 1646 | CCTCCAAGCTTTGCCTC (SEQ ID NO: 1646) | 3′ PBS |
| 1647 | CCTCCAAGCTTTGCCTCC (SEQ ID NO: 1647) | 3′ PBS |
| 1648 | CCTCCAAGCTTTGCCTCCC (SEQ ID NO: 1648) | 3′ PBS |
| 1649 | GAGGCAAAGCTTGGAGGTCAGTTTTAGAGCTAG | 3′ pegRNA |
| | AAATAGCAAGTTAAAATAAGGCTAGTCCGTTAT | |
| | CAACTTGAAAAAGTGGCACCGAGTCGGTGCATG | |
| | ATCCTGACGACGGAGACCGCCGTCGTCGACAAG | |
| | CCCCTCCAAGCTTT (SEQ ID NO: 1649) | |
| 1650 | GAGGCAAAGCTTGGAGGTCAGTTTTAGAGCTAG | 3′ pegRNA, transcription |
| | AAATAGCAAGTTAAAATAAGGCTAGTCCGTTAT | adaptation (3′TTTTTTT) |
| | CAACTTGAAAAAGTGGCACCGAGTCGGTGCATG | |
| | ATCCTGACGACGGAGACCGCCGTCGTCGACAAG | |
| | CCCCTCCAAGCTTTTTTTTTT (SEQ ID NO: 1650) | |
| 1651 | GAGGCAAAGCTTGGAGGTCAGTTTTAGAGCTAG | 3′ pegRNA |
| | AAATAGCAAGTTAAAATAAGGCTAGTCCGTTAT | |
| | CAACTTGAAAAAGTGGCACCGAGTCGGTGCATG | |
| | ATCCTGACGACGGAGACCGCCGTCGTCGACAAG | |
| | CCCCTCCAAGCT (SEQ ID NO: 1651) | |
| 1652 | GAGGCAAAGCTTGGAGGTCAGTTTTAGAGCTAG | 3′ pegRNA, transcription |
| | AAATAGCAAGTTAAAATAAGGCTAGTCCGTTAT | adaptation (3′TTTTTTT) |
| | CAACTTGAAAAAGTGGCACCGAGTCGGTGCATG | |
| | ATCCTGACGACGGAGACCGCCGTCGTCGACAAG | |
| | CCCCTCCAAGCTTTTTTTT (SEQ ID NO: 1652) | |

TABLE 43
Exemplary 3′ PEgRNA and component sequence

| Sequence | | |
|---|---|---|
| number | Sequence | Description |
| 1653 | AGTTTACTCCTCTGAAGGAA (SEQ ID NO: 1653) | 3′ Spacer |
| 1654 | TTACTCCTCTGAAGGAA (SEQ ID NO: 1654) | 3′ Spacer |
| 1655 | TTTACTCCTCTGAAGGAA (SEQ ID NO: 1655) | 3′ Spacer |
| 1656 | GTTTACTCCTCTGAAGGAA (SEQ ID NO: 1656) | 3′ Spacer |
| 1657 | CAGTTTACTCCTCTGAAGGAA (SEQ ID NO: 1657) | 3′ Spacer |
| 1658 | TCAGTTTACTCCTCTGAAGGAA (SEQ ID NO: | 3′ Spacer |
| | 1658) | |
| 1659 | CTTCA | 3′ PBS |
| 1660 | CTTCAG | 3′ PBS |
| 1661 | CTTCAGA | 3′ PBS |
| 1662 | CTTCAGAG | 3′ PBS |
| 1663 | CTTCAGAGG | 3′ PBS |
| 1664 | CTTCAGAGGA (SEQ ID NO: 1664) | 3′ PBS |
| 1665 | CTTCAGAGGAG (SEQ ID NO: 1665) | 3′ PBS |
| 1666 | CTTCAGAGGAGT (SEQ ID NO: 1666) | 3′ PBS |
| 1667 | CTTCAGAGGAGTA (SEQ ID NO: 1667) | 3′ PBS |
| 1668 | CTTCAGAGGAGTAA (SEQ ID NO: 1668) | 3′ PBS |
| 1669 | CTTCAGAGGAGTAAA (SEQ ID NO: 1669) | 3′ PBS |
| 1670 | CTTCAGAGGAGTAAAC (SEQ ID NO: 1670) | 3′ PBS |
| 1671 | CTTCAGAGGAGTAAACT (SEQ ID NO: 1671) | 3′ PBS |
| 1672 | CTTCAGAGGAGTAAACTG (SEQ ID NO: 1672) | 3′ PBS |
| 1673 | CTTCAGAGGAGTAAACTGA (SEQ ID NO: 1673) | 3′ PBS |
| 1674 | AGTTTACTCCTCTGAAGGAAGTTTTAGAGCTAGA | 3′ pegRNA |
| | AATAGCAAGTTAAAATAAGGCTAGTCCGTTATC | |
| | AACTTGAAAAAGTGGCACCGAGTCGGTGCATGA | |
| | TCCTGACGACGGAGACCGCCGTCGTCGACAAGC | |
| | CCTTCAGAGGAGT (SEQ ID NO: 1674) | |
| 1675 | GAGTTTACTCCTCTGAAGGAAGTTTTAGAGCTAG | 3′ pegRNA, transcription |
| | AAATAGCAAGTTAAAATAAGGCTAGTCCGTTAT | adaptation (5′G, |
| | CAACTTGAAAAAGTGGCACCGAGTCGGTGCATG | 3′TTTTTTT) |
| | ATCCTGACGACGGAGACCGCCGTCGTCGACAAG | |
| | CCCTTCAGAGGAGTTTTTTTT (SEQ ID NO: 1675) | |
| 1676 | AGTTTACTCCTCTGAAGGAAGTTTTAGAGCTAGA | 3′ pegRNA |
| | AATAGCAAGTTAAAATAAGGCTAGTCCGTTATC | |
| | AACTTGAAAAAGTGGCACCGAGTCGGTGCATGA | |
| | TCCTGACGACGGAGACCGCCGTCGTCGACAAGC | |
| | CCTTCAGAGGA (SEQ ID NO: 1676) | |
| 1677 | GAGTTTACTCCTCTGAAGGAAGTTTTAGAGCTAG | 3′ pegRNA, transcription |
| | AAATAGCAAGTTAAAATAAGGCTAGTCCGTTAT | adaptation (5′G, |
| | CAACTTGAAAAAGTGGCACCGAGTCGGTGCATG | 3′TTTTTTT) |
| | ATCCTGACGACGGAGACCGCCGTCGTCGACAAG | |
| | CCCTTCAGAGGATTTTTTT (SEQ ID NO: 1677) | |

TABLE 44
Exemplary 3′ PERNA and component sequence

| Sequence | | |
|---|---|---|
| number | Sequence | Description |
| 1678 | AGCAGTGCTCAAAACATCCA (SEQ ID NO: 1678) | 3′ Spacer |
| 1679 | AGTGCTCAAAACATCCA (SEQ ID NO: 1679) | 3′ Spacer |
| 1680 | CAGTGCTCAAAACATCCA (SEQ ID NO: 1680) | 3′ Spacer |
| 1681 | GCAGTGCTCAAAACATCCA (SEQ ID NO: 1681) | 3′ Spacer |
| 1682 | AAGCAGTGCTCAAAACATCCA (SEQ ID NO: 1682) | 3′ Spacer |
| 1683 | AAAGCAGTGCTCAAAACATCCA (SEQ ID NO: | 3′ Spacer |
| | 1683) | |
| 1684 | ATGTT | 3′ PBS |
| 1685 | ATGTTT | 3′ PBS |
| 1686 | ATGTTTT | 3′ PBS |
| 1687 | ATGTTTTG | 3′ PBS |
| 1688 | ATGTTTTGA | 3′ PBS |
| 1689 | ATGTTTTGAG (SEQ ID NO: 1689) | 3′ PBS |
| 1690 | ATGTTTTGAGC (SEQ ID NO: 1690) | 3′ PBS |
| 1691 | ATGTTTTGAGCA (SEQ ID NO: 1691) | 3′ PBS |
| 1692 | ATGTTTTGAGCAC (SEQ ID NO: 1692) | 3′ PBS |
| 1693 | ATGTTTTGAGCACT (SEQ ID NO: 1693) | 3′ PBS |
| 1694 | ATGTTTTGAGCACTG (SEQ ID NO: 1694) | 3′ PBS |
| 1695 | ATGTTTTGAGCACTGC (SEQ ID NO: 1695) | 3′ PBS |
| 1696 | ATGTTTTGAGCACTGCT (SEQ ID NO: 1696) | 3′ PBS |
| 1697 | ATGTTTTGAGCACTGCTT (SEQ ID NO: 1697) | 3′ PBS |
| 1698 | ATGTTTTGAGCACTGCTTT (SEQ ID NO: 1698) | 3′ PBS |
| 1699 | AGCAGTGCTCAAAACATCCAGTTTTAGAGCTAG | 3′ pegRNA |
| | AAATAGCAAGTTAAAATAAGGCTAGTCCGTTAT | |
| | CAACTTGAAAAAGTGGCACCGAGTCGGTGCATG | |
| | ATCCTGACGACGGAGACCGCCGTCGTCGACAAG | |
| | CCATGTTTTGAGCA (SEQ ID NO: 1699) | |
| 1700 | GAGCAGTGCTCAAAACATCCAGTTTTAGAGCTA | 3′ pegRNA, transcription |
| | GAAATAGCAAGTTAAAATAAGGCTAGTCCGTTA | adaptation (5′G, |
| | TCAACTTGAAAAAGTGGCACCGAGTCGGTGCAT | 3′TTTTTTT) |
| | GATCCTGACGACGGAGACCGCCGTCGTCGACAA | |
| | GCCATGTTTTGAGCATTTTTTT (SEQ ID NO: 1700) | |
| 1701 | AGCAGTGCTCAAAACATCCAGTTTTAGAGCTAG | 3′ pegRNA |
| | AAATAGCAAGTTAAAATAAGGCTAGTCCGTTAT | |
| | CAACTTGAAAAAGTGGCACCGAGTCGGTGCATG | |
| | ATCCTGACGACGGAGACCGCCGTCGTCGACAAG | |
| | CCATGTTTTGAG (SEQ ID NO: 1701) | |
| 1702 | GAGCAGTGCTCAAAACATCCAGTTTTAGAGCTA | 3′ pegRNA, transcription |
| | GAAATAGCAAGTTAAAATAAGGCTAGTCCGTTA | adaptation (5′G, |
| | TCAACTTGAAAAAGTGGCACCGAGTCGGTGCAT | 3′TTTTTTT) |
| | GATCCTGACGACGGAGACCGCCGTCGTCGACAA | |
| | GCCATGTTTTGAGTTTTTTT (SEQ ID NO: 1702) | |

TABLE 45
Exemplary 3′ PEgRNA and component sequence

| Sequence | | |
|---|---|---|
| number | Sequence | Description |
| 1703 | AGACATTAAGTGGCAGAGCT (SEQ ID NO: 1703) | 3′ Spacer |
| 1704 | CATTAAGTGGCAGAGCT (SEQ ID NO: 1704) | 3′ Spacer |
| 1705 | ACATTAAGTGGCAGAGCT (SEQ ID NO: 1705) | 3′ Spacer |
| 1706 | GACATTAAGTGGCAGAGCT (SEQ ID NO: 1706) | 3′ Spacer |
| 1707 | CAGACATTAAGTGGCAGAGCT (SEQ ID NO: 1707) | 3′ Spacer |
| 1708 | ACAGACATTAAGTGGCAGAGCT (SEQ ID NO: | 3′ Spacer |
| | 1708) | |
| 1709 | TCTGC | 3′ PBS |
| 1710 | TCTGCC | 3′ PBS |
| 1711 | TCTGCCA | 3′ PBS |
| 1712 | TCTGCCAC | 3′ PBS |
| 1713 | TCTGCCACT | 3′ PBS |
| 1714 | TCTGCCACTT (SEQ ID NO: 1714) | 3′ PBS |
| 1715 | TCTGCCACTTA (SEQ ID NO: 1715) | 3′ PBS |
| 1716 | TCTGCCACTTAA (SEQ ID NO: 1716) | 3′ PBS |
| 1717 | TCTGCCACTTAAT (SEQ ID NO: 1717) | 3′ PBS |
| 1718 | TCTGCCACTTAATG (SEQ ID NO: 1718) | 3′ PBS |
| 1719 | TCTGCCACTTAATGT (SEQ ID NO: 1719) | 3′ PBS |
| 1720 | TCTGCCACTTAATGTC (SEQ ID NO: 1720) | 3′ PBS |
| 1721 | TCTGCCACTTAATGTCT (SEQ ID NO: 1721) | 3′ PBS |
| 1722 | TCTGCCACTTAATGTCTG (SEQ ID NO: 1722) | 3′ PBS |
| 1723 | TCTGCCACTTAATGTCTGT (SEQ ID NO: 1723) | 3′ PBS |
| 1724 | AGACATTAAGTGGCAGAGCTGTTTTAGAGCTAG | 3′ pegRNA |
| | AAATAGCAAGTTAAAATAAGGCTAGTCCGTTAT | |
| | CAACTTGAAAAAGTGGCACCGAGTCGGTGCATG | |
| | ATCCTGACGACGGAGACCGCCGTCGTCGACAAG | |
| | CCTCTGCCACTTAA (SEQ ID NO: 1724) | |
| 1725 | GAGACATTAAGTGGCAGAGCTGTTTTAGAGCTA | 3′ pegRNA, transcription |
| | GAAATAGCAAGTTAAAATAAGGCTAGTCCGTTA | adaptation (5′G, |
| | TCAACTTGAAAAAGTGGCACCGAGTCGGTGCAT | 3′TTTTTTT) |
| | GATCCTGACGACGGAGACCGCCGTCGTCGACAA | |
| | GCCTCTGCCACTTAATTTTTTT (SEQ ID NO: 1725) | |
| 1726 | AGACATTAAGTGGCAGAGCTGTTTTAGAGCTAG | 3′ pegRNA |
| | AAATAGCAAGTTAAAATAAGGCTAGTCCGTTAT | |
| | CAACTTGAAAAAGTGGCACCGAGTCGGTGCATG | |
| | ATCCTGACGACGGAGACCGCCGTCGTCGACAAG | |
| | CCTCTGCCACTT (SEQ ID NO: 1726) | |
| 1727 | GAGACATTAAGTGGCAGAGCTGTTTTAGAGCTA | 3′ pegRNA, transcription |
| | GAAATAGCAAGTTAAAATAAGGCTAGTCCGTTA | adaptation (5′G, |
| | TCAACTTGAAAAAGTGGCACCGAGTCGGTGCAT | 3′TTTTTTT) |
| | GATCCTGACGACGGAGACCGCCGTCGTCGACAA | |
| | GCCTCTGCCACTTTTTTTTT (SEQ ID NO: 1727) | |

TABLE 46
Exemplary 3′ PERNA and component sequence

| Sequence | | |
|---|---|---|
| number | Sequence | Description |
| 1728 | TGAGGAAACTGACGCACCAA (SEQ ID NO: 1728) | 3′ Spacer |
| 1729 | GGAAACTGACGCACCAA (SEQ ID NO: 1729) | 3′ Spacer |
| 1730 | AGGAAACTGACGCACCAA (SEQ ID NO: 1730) | 3′ Spacer |
| 1731 | GAGGAAACTGACGCACCAA (SEQ ID NO: 1731) | 3′ Spacer |
| 1732 | ATGAGGAAACTGACGCACCAA (SEQ ID NO: 1732) | 3′ Spacer |
| 1733 | GATGAGGAAACTGACGCACCAA (SEQ ID NO: | 3′ Spacer |
| | 1733) | |
| 1734 | GTGCG | 3′ PBS |
| 1735 | GTGCGT | 3′ PBS |
| 1736 | GTGCGTC | 3′ PBS |
| 1737 | GTGCGTCA | 3′ PBS |
| 1738 | GTGCGTCAG | 3′ PBS |
| 1739 | GTGCGTCAGT (SEQ ID NO: 1739) | 3′ PBS |
| 1740 | GTGCGTCAGTT (SEQ ID NO: 1740) | 3′ PBS |
| 1741 | GTGCGTCAGTTT (SEQ ID NO: 1741) | 3′ PBS |
| 1742 | GTGCGTCAGTTTC (SEQ ID NO: 1742) | 3′ PBS |
| 1743 | GTGCGTCAGTTTCC (SEQ ID NO: 1743) | 3′ PBS |
| 1744 | GTGCGTCAGTTTCCT (SEQ ID NO: 1744) | 3′ PBS |
| 1745 | GTGCGTCAGTTTCCTC (SEQ ID NO: 1745) | 3′ PBS |
| 1746 | GTGCGTCAGTTTCCTCA (SEQ ID NO: 1746) | 3′ PBS |
| 1747 | GTGCGTCAGTTTCCTCAT (SEQ ID NO: 1747) | 3′ PBS |
| 1748 | GTGCGTCAGTTTCCTCATC (SEQ ID NO: 1748) | 3′ PBS |
| 1749 | TGAGGAAACTGACGCACCAAGTTTTAGAGCTAG | 3′ pegRNA |
| | AAATAGCAAGTTAAAATAAGGCTAGTCCGTTAT | |
| | CAACTTGAAAAAGTGGCACCGAGTCGGTGCATG | |
| | ATCCTGACGACGGAGACCGCCGTCGTCGACAAG | |
| | CCGTGCGTCAGTTT (SEQ ID NO: 1749) | |
| 1750 | GTGAGGAAACTGACGCACCAAGTTTTAGAGCTA | 3′ pegRNA, transcription |
| | GAAATAGCAAGTTAAAATAAGGCTAGTCCGTTA | adaptation (5′G, |
| | TCAACTTGAAAAAGTGGCACCGAGTCGGTGCAT | 3′TTTTTTT) |
| | GATCCTGACGACGGAGACCGCCGTCGTCGACAA | |
| | GCCGTGCGTCAGTTTTTTTTTT (SEQ ID NO: 1750) | |
| 1751 | TGAGGAAACTGACGCACCAAGTTTTAGAGCTAG | 3′ pegRNA |
| | AAATAGCAAGTTAAAATAAGGCTAGTCCGTTAT | |
| | CAACTTGAAAAAGTGGCACCGAGTCGGTGCATG | |
| | ATCCTGACGACGGAGACCGCCGTCGTCGACAAG | |
| | CCGTGCGTCAGT (SEQ ID NO: 1751) | |
| 1752 | GTGAGGAAACTGACGCACCAAGTTTTAGAGCTA | 3′ pegRNA, transcription |
| | GAAATAGCAAGTTAAAATAAGGCTAGTCCGTTA | adaptation (5′G, |
| | TCAACTTGAAAAAGTGGCACCGAGTCGGTGCAT | 3′TTTTTTT) |
| | GATCCTGACGACGGAGACCGCCGTCGTCGACAA | |
| | GCCGTGCGTCAGTTTTTTTT (SEQ ID NO: 1752) | |

TABLE 47
Exemplary 3′ PEgRNA and component sequence

| Sequence | | |
|---|---|---|
| number | Sequence | Description |
| 1753 | GGCTGGGAACATGAGCCTGG (SEQ ID NO: 1753) | 3′ Spacer |
| 1754 | TGGGAACATGAGCCTGG (SEQ ID NO: 1754) | 3′ Spacer |
| 1755 | CTGGGAACATGAGCCTGG (SEQ ID NO: 1755) | 3′ Spacer |
| 1756 | GCTGGGAACATGAGCCTGG (SEQ ID NO: 1756) | 3′ Spacer |
| 1757 | TGGCTGGGAACATGAGCCTGG (SEQ ID NO: 1757) | 3′ Spacer |
| 1758 | TTGGCTGGGAACATGAGCCTGG (SEQ ID NO: | 3′ Spacer |
| | 1758) | |
| 1192 | GGCTC | 3′ PBS |
| 1759 | GGCTCA | 3′ PBS |
| 1760 | GGCTCAT | 3′ PBS |
| 1761 | GGCTCATG | 3′ PBS |
| 1762 | GGCTCATGT | 3′ PBS |
| 1763 | GGCTCATGTT (SEQ ID NO: 1763) | 3′ PBS |
| 1764 | GGCTCATGTTC (SEQ ID NO: 1764) | 3′ PBS |
| 1765 | GGCTCATGTTCC (SEQ ID NO: 1765) | 3′ PBS |
| 1766 | GGCTCATGTTCCC (SEQ ID NO: 1766) | 3′ PBS |
| 1767 | GGCTCATGTTCCCA (SEQ ID NO: 1767) | 3′ PBS |
| 1768 | GGCTCATGTTCCCAG (SEQ ID NO: 1768) | 3′ PBS |
| 1769 | GGCTCATGTTCCCAGC (SEQ ID NO: 1769) | 3′ PBS |
| 1770 | GGCTCATGTTCCCAGCC (SEQ ID NO: 1770) | 3′ PBS |
| 1771 | GGCTCATGTTCCCAGCCA (SEQ ID NO: 1771) | 3′ PBS |
| 1772 | GGCTCATGTTCCCAGCCAA (SEQ ID NO: 1772) | 3′ PBS |
| 1773 | GGCTGGGAACATGAGCCTGGGTTTTAGAGCTAG | 3′ pegRNA |
| | AAATAGCAAGTTAAAATAAGGCTAGTCCGTTAT | |
| | CAACTTGAAAAAGTGGCACCGAGTCGGTGCATG | |
| | ATCCTGACGACGGAGACCGCCGTCGTCGACAAG | |
| | CCGGCTCATGTTCC (SEQ ID NO: 1773) | |
| 1774 | GGCTGGGAACATGAGCCTGGGTTTTAGAGCTAG | 3′ pegRNA, transcription |
| | AAATAGCAAGTTAAAATAAGGCTAGTCCGTTAT | adaptation (3′TTTTTTT) |
| | CAACTTGAAAAAGTGGCACCGAGTCGGTGCATG | |
| | ATCCTGACGACGGAGACCGCCGTCGTCGACAAG | |
| | CCGGCTCATGTTCCTTTTTTT (SEQ ID NO: 1774) | |
| 1775 | GGCTGGGAACATGAGCCTGGGTTTTAGAGCTAG | 3′ pegRNA |
| | AAATAGCAAGTTAAAATAAGGCTAGTCCGTTAT | |
| | CAACTTGAAAAAGTGGCACCGAGTCGGTGCATG | |
| | ATCCTGACGACGGAGACCGCCGTCGTCGACAAG | |
| | CCGGCTCATGTT (SEQ ID NO: 1775) | |
| 1776 | GGCTGGGAACATGAGCCTGGGTTTTAGAGCTAG | 3′ pegRNA, transcription |
| | AAATAGCAAGTTAAAATAAGGCTAGTCCGTTAT | adaptation (3′TTTTTTT) |
| | CAACTTGAAAAAGTGGCACCGAGTCGGTGCATG | |
| | ATCCTGACGACGGAGACCGCCGTCGTCGACAAG | |
| | CCGGCTCATGTTTTTTTTT (SEQ ID NO: 1776) | |

TABLE 48
Exemplary 3′ PEgRNA and component sequence

| Sequence | | |
|---|---|---|
| number | Sequence | Description |
| 1777 | AAGGCAGGGCAGCACTTTGT (SEQ ID NO: 1777) | 3′ Spacer |
| 1778 | GCAGGGCAGCACTTTGT (SEQ ID NO: 1778) | 3′ Spacer |
| 1779 | GGCAGGGCAGCACTTTGT (SEQ ID NO: 1779) | 3′ Spacer |
| 1780 | AGGCAGGGCAGCACTTTGT (SEQ ID NO: 1780) | 3′ Spacer |
| 1781 | GAAGGCAGGGCAGCACTTTGT (SEQ ID NO: 1781) | 3′ Spacer |
| 1782 | AGAAGGCAGGGCAGCACTTTGT (SEQ ID NO: | 3′ Spacer |
| | 1782) | |
| 1783 | AAGTG | 3′ PBS |
| 1784 | AAGTGC | 3′ PBS |
| 1785 | AAGTGCT | 3′ PBS |
| 1786 | AAGTGCTG | 3′ PBS |
| 1787 | AAGTGCTGC | 3′ PBS |
| 1788 | AAGTGCTGCC (SEQ ID NO: 1788) | 3′ PBS |
| 1789 | AAGTGCTGCCC (SEQ ID NO: 1789) | 3′ PBS |
| 1790 | AAGTGCTGCCCT (SEQ ID NO: 1790) | 3′ PBS |
| 1791 | AAGTGCTGCCCTG (SEQ ID NO: 1791) | 3′ PBS |
| 1792 | AAGTGCTGCCCTGC (SEQ ID NO: 1792) | 3′ PBS |
| 1793 | AAGTGCTGCCCTGCC (SEQ ID NO: 1793) | 3′ PBS |
| 1794 | AAGTGCTGCCCTGCCT (SEQ ID NO: 1794) | 3′ PBS |
| 1795 | AAGTGCTGCCCTGCCTT (SEQ ID NO: 1795) | 3′ PBS |
| 1796 | AAGTGCTGCCCTGCCTTC (SEQ ID NO: 1796) | 3′ PBS |
| 1797 | AAGTGCTGCCCTGCCTTCT (SEQ ID NO: 1797) | 3′ PBS |
| 1798 | AAGGCAGGGCAGCACTTTGTGTTTTAGAGCTAG | 3′ pegRNA |
| | AAATAGCAAGTTAAAATAAGGCTAGTCCGTTAT | |
| | CAACTTGAAAAAGTGGCACCGAGTCGGTGCATG | |
| | ATCCTGACGACGGAGACCGCCGTCGTCGACAAG | |
| | CCAAGTGCTGCCCT (SEQ ID NO: 1798) | |
| 1799 | GAAGGCAGGGCAGCACTTTGTGTTTTAGAGCTA | 3′ pegRNA, transcription |
| | GAAATAGCAAGTTAAAATAAGGCTAGTCCGTTA | adaptation (5′G, |
| | TCAACTTGAAAAAGTGGCACCGAGTCGGTGCAT | 3′TTTTTTT) |
| | GATCCTGACGACGGAGACCGCCGTCGTCGACAA | |
| | GCCAAGTGCTGCCCTTTTTTTT (SEQ ID NO: 1799) | |
| 1800 | AAGGCAGGGCAGCACTTTGTGTTTTAGAGCTAG | 3′ pegRNA |
| | AAATAGCAAGTTAAAATAAGGCTAGTCCGTTAT | |
| | CAACTTGAAAAAGTGGCACCGAGTCGGTGCATG | |
| | ATCCTGACGACGGAGACCGCCGTCGTCGACAAG | |
| | CCAAGTGCTGCC (SEQ ID NO: 1800) | |
| 1801 | GAAGGCAGGGCAGCACTTTGTGTTTTAGAGCTA | 3′ pegRNA, transcription |
| | GAAATAGCAAGTTAAAATAAGGCTAGTCCGTTA | adaptation (5′G, |
| | TCAACTTGAAAAAGTGGCACCGAGTCGGTGCAT | 3′TTTTTTT) |
| | GATCCTGACGACGGAGACCGCCGTCGTCGACAA | |
| | GCCAAGTGCTGCCTTTTTTT (SEQ ID NO: 1801) | |

TABLE 49
Exemplary 3′ PEgRNA and component sequence

| Sequence | | |
|---|---|---|
| number | Sequence | Description |
| 1802 | CTATGACAGCTGAAATAAGA (SEQ ID NO: 1802) | 3′ Spacer |
| 1803 | TGACAGCTGAAATAAGA (SEQ ID NO: 1803) | 3′ Spacer |
| 1804 | ATGACAGCTGAAATAAGA (SEQ ID NO: 1804) | 3′ Spacer |
| 1805 | TATGACAGCTGAAATAAGA (SEQ ID NO: 1805) | 3′ Spacer |
| 1806 | ACTATGACAGCTGAAATAAGA (SEQ ID NO: 1806) | 3′ Spacer |
| 1807 | CACTATGACAGCTGAAATAAGA (SEQ ID NO: | 3′ Spacer |
| | 1807) | |
| 1808 | TATTT | 3′ PBS |
| 1809 | TATTTC | 3′ PBS |
| 1810 | TATTTCA | 3′ PBS |
| 1811 | TATTTCAG | 3′ PBS |
| 1812 | TATTTCAGC | 3′ PBS |
| 1813 | TATTTCAGCT (SEQ ID NO: 1813) | 3′ PBS |
| 1814 | TATTTCAGCTG (SEQ ID NO: 1814) | 3′ PBS |
| 1815 | TATTTCAGCTGT (SEQ ID NO: 1815) | 3′ PBS |
| 1816 | TATTTCAGCTGTC (SEQ ID NO: 1816) | 3′ PBS |
| 1817 | TATTTCAGCTGTCA (SEQ ID NO: 1817) | 3′ PBS |
| 1818 | TATTTCAGCTGTCAT (SEQ ID NO: 1818) | 3′ PBS |
| 1819 | TATTTCAGCTGTCATA (SEQ ID NO: 1819) | 3′ PBS |
| 1820 | TATTTCAGCTGTCATAG (SEQ ID NO: 1820) | 3′ PBS |
| 1821 | TATTTCAGCTGTCATAGT (SEQ ID NO: 1821) | 3′ PBS |
| 1822 | TATTTCAGCTGTCATAGTG (SEQ ID NO: 1822) | 3′ PBS |
| 1823 | CTATGACAGCTGAAATAAGAGTTTTAGAGCTAG | 3′ pegRNA |
| | AAATAGCAAGTTAAAATAAGGCTAGTCCGTTAT | |
| | CAACTTGAAAAAGTGGCACCGAGTCGGTGCATG | |
| | ATCCTGACGACGGAGACCGCCGTCGTCGACAAG | |
| | CCTATTTCAGCTGT (SEQ ID NO: 1823) | |
| 1824 | GCTATGACAGCTGAAATAAGAGTTTTAGAGCTA | 3′ pegRNA, transcription |
| | GAAATAGCAAGTTAAAATAAGGCTAGTCCGTTA | adaptation (5′G, |
| | TCAACTTGAAAAAGTGGCACCGAGTCGGTGCAT | 3′TTTTTTT) |
| | GATCCTGACGACGGAGACCGCCGTCGTCGACAA | |
| | GCCTATTTCAGCTGTTTTTTTT (SEQ ID NO: 1824) | |
| 1825 | CTATGACAGCTGAAATAAGAGTTTTAGAGCTAG | 3′ pegRNA |
| | AAATAGCAAGTTAAAATAAGGCTAGTCCGTTAT | |
| | CAACTTGAAAAAGTGGCACCGAGTCGGTGCATG | |
| | ATCCTGACGACGGAGACCGCCGTCGTCGACAAG | |
| | CCTATTTCAGCT (SEQ ID NO: 1825) | |
| 1826 | GCTATGACAGCTGAAATAAGAGTTTTAGAGCTA | 3′ pegRNA, transcription |
| | GAAATAGCAAGTTAAAATAAGGCTAGTCCGTTA | adaptation (5′G, |
| | TCAACTTGAAAAAGTGGCACCGAGTCGGTGCAT | 3′TTTTTTT) |
| | GATCCTGACGACGGAGACCGCCGTCGTCGACAA | |
| | GCCTATTTCAGCTTTTTTTT (SEQ ID NO: 1826) | |

TABLE 50
Exemplary 3′ PEgRNA and component sequence

| Sequence | | |
|---|---|---|
| number | Sequence | Description |
| 1827 | CAAGACTAGCCTGGCCAACA (SEQ ID NO: 1827) | 3′ Spacer |
| 1828 | GACTAGCCTGGCCAACA (SEQ ID NO: 1828) | 3′ Spacer |
| 1829 | AGACTAGCCTGGCCAACA (SEQ ID NO: 1829) | 3′ Spacer |
| 1830 | AAGACTAGCCTGGCCAACA (SEQ ID NO: 1830) | 3′ Spacer |
| 1831 | TCAAGACTAGCCTGGCCAACA (SEQ ID NO: 1831) | 3′ Spacer |
| 1832 | TTCAAGACTAGCCTGGCCAACA (SEQ ID NO: 1832) | 3′ Spacer |
| 337 | TGGCC | 3′ PBS |
| 338 | TGGCCA | 3′ PBS |
| 339 | TGGCCAG | 3′ PBS |
| 340 | TGGCCAGG | 3′ PBS |
| 1833 | TGGCCAGGC | 3′ PBS |
| 1834 | TGGCCAGGCT (SEQ ID NO: 1834) | 3′ PBS |
| 1835 | TGGCCAGGCTA (SEQ ID NO: 1835) | 3′ PBS |
| 1836 | TGGCCAGGCTAG (SEQ ID NO: 1836) | 3′ PBS |
| 1837 | TGGCCAGGCTAGT (SEQ ID NO: 1837) | 3′ PBS |
| 1838 | TGGCCAGGCTAGTC (SEQ ID NO: 1838) | 3′ PBS |
| 1839 | TGGCCAGGCTAGTCT (SEQ ID NO: 1839) | 3′ PBS |
| 1840 | TGGCCAGGCTAGTCTT (SEQ ID NO: 1840) | 3′ PBS |
| 1841 | TGGCCAGGCTAGTCTTG (SEQ ID NO: 1841) | 3′ PBS |
| 1842 | TGGCCAGGCTAGTCTTGA (SEQ ID NO: 1842) | 3′ PBS |
| 1843 | TGGCCAGGCTAGTCTTGAA (SEQ ID NO: 1843) | 3′ PBS |
| 1844 | CAAGACTAGCCTGGCCAACAGTTTTAGAGCTAG | 3′ pegRNA |
| | AAATAGCAAGTTAAAATAAGGCTAGTCCGTTAT | |
| | CAACTTGAAAAAGTGGCACCGAGTCGGTGCATG | |
| | ATCCTGACGACGGAGACCGCCGTCGTCGACAAG | |
| | CCTGGCCAGGCTAG (SEQ ID NO: 1844) | |
| 1845 | GCAAGACTAGCCTGGCCAACAGTTTTAGAGCTA | 3′ pegRNA, |
| | GAAATAGCAAGTTAAAATAAGGCTAGTCCGTTA | transcription |
| | TCAACTTGAAAAAGTGGCACCGAGTCGGTGCAT | adaptation |
| | GATCCTGACGACGGAGACCGCCGTCGTCGACAA | (5′ G, |
| | GCCTGGCCAGGCTAGTTTTTTT (SEQ ID NO: 1845) | 3′ TTTTTTT) |
| 1846 | CAAGACTAGCCTGGCCAACAGTTTTAGAGCTAG | 3′ pegRNA |
| | AAATAGCAAGTTAAAATAAGGCTAGTCCGTTAT | |
| | CAACTTGAAAAAGTGGCACCGAGTCGGTGCATG | |
| | ATCCTGACGACGGAGACCGCCGTCGTCGACAAG | |
| | CCTGGCCAGGCT (SEQ ID NO: 1846) | |
| 1847 | GCAAGACTAGCCTGGCCAACAGTTTTAGAGCTA | 3′ pegRNA, |
| | GAAATAGCAAGTTAAAATAAGGCTAGTCCGTTA | transcription |
| | TCAACTTGAAAAAGTGGCACCGAGTCGGTGCAT | adaptation |
| | GATCCTGACGACGGAGACCGCCGTCGTCGACAA | (5′ G, |
| | GCCTGGCCAGGCTTTTTTTT (SEQ ID NO: 1847) | 3′ TTTTTTT) |

TABLE 51
Exemplary 3′ PEgRNA and component sequence

| Sequence | | |
|---|---|---|
| number | Sequence | Description |
| 1848 | TCAGGAGTTCAAGACTAGCC (SEQ ID NO: 1848) | 3′ Spacer |
| 1849 | GGAGTTCAAGACTAGCC (SEQ ID NO: 1849) | 3′ Spacer |
| 1850 | AGGAGTTCAAGACTAGCC (SEQ ID NO: 1850) | 3′ Spacer |
| 1851 | CAGGAGTTCAAGACTAGCC (SEQ ID NO: 1851) | 3′ Spacer |
| 1852 | GTCAGGAGTTCAAGACTAGCC (SEQ ID NO: 1852) | 3′ Spacer |
| 1853 | GGTCAGGAGTTCAAGACTAGCC (SEQ ID NO: 1853) | 3′ Spacer |
| 1854 | TAGTC | 3′ PBS |
| 1855 | TAGTCT | 3′ PBS |
| 1856 | TAGTCTT | 3′ PBS |
| 1857 | TAGTCTTG | 3′ PBS |
| 1858 | TAGTCTTGA | 3′ PBS |
| 1859 | TAGTCTTGAA (SEQ ID NO: 1859) | 3′ PBS |
| 1860 | TAGTCTTGAAC (SEQ ID NO: 1860) | 3′ PBS |
| 1861 | TAGTCTTGAACT (SEQ ID NO: 1861) | 3′ PBS |
| 1862 | TAGTCTTGAACTC (SEQ ID NO: 1862) | 3′ PBS |
| 1863 | TAGTCTTGAACTCC (SEQ ID NO: 1863) | 3′ PBS |
| 1864 | TAGTCTTGAACTCCT (SEQ ID NO: 1864) | 3′ PBS |
| 1865 | TAGTCTTGAACTCCTG (SEQ ID NO: 1865) | 3′ PBS |
| 1866 | TAGTCTTGAACTCCTGA (SEQ ID NO: 1866) | 3′ PBS |
| 1867 | TAGTCTTGAACTCCTGAC (SEQ ID NO: 1867) | 3′ PBS |
| 1868 | TAGTCTTGAACTCCTGACC (SEQ ID NO: 1868) | 3′ PBS |
| 1869 | TCAGGAGTTCAAGACTAGCCGTTTTAGAGCTAG | 3′ pegRNA |
| | AAATAGCAAGTTAAAATAAGGCTAGTCCGTTAT | |
| | CAACTTGAAAAAGTGGCACCGAGTCGGTGCATG | |
| | ATCCTGACGACGGAGACCGCCGTCGTCGACAAG | |
| | CCTAGTCTTGAACT (SEQ ID NO: 1869) | |
| 1870 | GTCAGGAGTTCAAGACTAGCCGTTTTAGAGCTA | 3′ pegRNA, |
| | GAAATAGCAAGTTAAAATAAGGCTAGTCCGTTA | transcription |
| | TCAACTTGAAAAAGTGGCACCGAGTCGGTGCAT | adaptation |
| | GATCCTGACGACGGAGACCGCCGTCGTCGACAA | (5′ G, |
| | GCCTAGTCTTGAACTTTTTTTT (SEQ ID NO: 1870) | 3′ TTTTTTT) |
| 1871 | TCAGGAGTTCAAGACTAGCCGTTTTAGAGCTAG | 3′ pegRNA |
| | AAATAGCAAGTTAAAATAAGGCTAGTCCGTTAT | |
| | CAACTTGAAAAAGTGGCACCGAGTCGGTGCATG | |
| | ATCCTGACGACGGAGACCGCCGTCGTCGACAAG | |
| | CCTAGTCTTGAA (SEQ ID NO: 1871) | |
| 1872 | GTCAGGAGTTCAAGACTAGCCGTTTTAGAGCTA | 3′ pegRNA, |
| | GAAATAGCAAGTTAAAATAAGGCTAGTCCGTTA | transcription |
| | TCAACTTGAAAAAGTGGCACCGAGTCGGTGCAT | adaptation |
| | GATCCTGACGACGGAGACCGCCGTCGTCGACAA | (5 ′G, |
| | GCCTAGTCTTGAATTTTTTT (SEQ ID NO: 1872) | 3′ TTTTTTT) |

TABLE 52
Exemplary 3′ PERNA and component sequence

| Sequence | | |
|---|---|---|
| number | Sequence | Description |
| 1873 | TGATTCATTAACACTGATCT (SEQ ID NO: 1873) | 3′ Spacer |
| 1874 | TTCATTAACACTGATCT (SEQ ID NO: 1874) | 3′ Spacer |
| 1875 | ATTCATTAACACTGATCT (SEQ ID NO: 1875) | 3′ Spacer |
| 1876 | GATTCATTAACACTGATCT (SEQ ID NO: 1876) | 3′ Spacer |
| 1877 | TTGATTCATTAACACTGATCT (SEQ ID NO: 1877) | 3′ Spacer |
| 1878 | GTTGATTCATTAACACTGATCT (SEQ ID NO: 1878) | 3′ Spacer |
| 1879 | TCAGT | 3′ PBS |
| 1880 | TCAGTG | 3′ PBS |
| 1881 | TCAGTGT | 3′ PBS |
| 1882 | TCAGTGTT | 3′ PBS |
| 1883 | TCAGTGTTA | 3′ PBS |
| 1884 | TCAGTGTTAA (SEQ ID NO: 1884) | 3′ PBS |
| 1885 | TCAGTGTTAAT (SEQ ID NO: 1885) | 3′ PBS |
| 1886 | TCAGTGTTAATG (SEQ ID NO: 1886) | 3′ PBS |
| 1887 | TCAGTGTTAATGA (SEQ ID NO: 1887) | 3′ PBS |
| 1888 | TCAGTGTTAATGAA (SEQ ID NO: 1888) | 3′ PBS |
| 1889 | TCAGTGTTAATGAAT (SEQ ID NO: 1889) | 3′ PBS |
| 1890 | TCAGTGTTAATGAATC (SEQ ID NO: 1890) | 3′ PBS |
| 1891 | TCAGTGTTAATGAATCA (SEQ ID NO: 1891) | 3′ PBS |
| 1892 | TCAGTGTTAATGAATCAA (SEQ ID NO: 1892) | 3′ PBS |
| 1893 | TCAGTGTTAATGAATCAAC (SEQ ID NO: 1893) | 3′ PBS |
| 1894 | TGATTCATTAACACTGATCTGTTTTAGAGCTAGA | 3′ pegRNA |
| | AATAGCAAGTTAAAATAAGGCTAGTCCGTTATC | |
| | AACTTGAAAAAGTGGCACCGAGTCGGTGCATGA | |
| | TCCTGACGACGGAGACCGCCGTCGTCGACAAGC | |
| | CTCAGTGTTAATG (SEQ ID NO: 1894) | |
| 1895 | GTGATTCATTAACACTGATCTGTTTTAGAGCTAG | 3′ pegRNA, |
| | AAATAGCAAGTTAAAATAAGGCTAGTCCGTTAT | transcription |
| | CAACTTGAAAAAGTGGCACCGAGTCGGTGCATG | adaptation |
| | ATCCTGACGACGGAGACCGCCGTCGTCGACAAG | (5′ G, 3′ TTTTTTT) |
| | CCTCAGTGTTAATGTTTTTTT (SEQ ID NO: 1895) | |
| 1896 | TGATTCATTAACACTGATCTGTTTTAGAGCTAGA | 3′ pegRNA |
| | AATAGCAAGTTAAAATAAGGCTAGTCCGTTATC | |
| | AACTTGAAAAAGTGGCACCGAGTCGGTGCATGA | |
| | TCCTGACGACGGAGACCGCCGTCGTCGACAAGC | |
| | CTCAGTGTTAA (SEQ ID NO: 1896) | |
| 1897 | GTGATTCATTAACACTGATCTGTTTTAGAGCTAG | 3′ pegRNA, |
| | AAATAGCAAGTTAAAATAAGGCTAGTCCGTTAT | transcription |
| | CAACTTGAAAAAGTGGCACCGAGTCGGTGCATG | adaptation |
| | ATCCTGACGACGGAGACCGCCGTCGTCGACAAG | (5 ′G, 3′ TTTTTTT) |
| | CCTCAGTGTTAATTTTTTT (SEQ ID NO: 1897) | |

TABLE 53
Exemplary 3′ PEgRNA and component sequence

| Sequence | | |
|---|---|---|
| number | Sequence | Description |
| 1898 | GTCTTGCCAAGGACCTCAGC (SEQ ID NO: 1898) | 3′ Spacer |
| 1899 | TTGCCAAGGACCTCAGC (SEQ ID NO: 1899) | 3′ Spacer |
| 1900 | CTTGCCAAGGACCTCAGC (SEQ ID NO: 1900) | 3′ Spacer |
| 1901 | TCTTGCCAAGGACCTCAGC (SEQ ID NO: 1901) | 3′ Spacer |
| 1902 | GGTCTTGCCAAGGACCTCAGC (SEQ ID NO: 1902) | 3′ Spacer |
| 1903 | GGGTCTTGCCAAGGACCTCAGC (SEQ ID NO: 1903) | 3′ Spacer |
| 1904 | GAGGT | 3′ PBS |
| 1905 | GAGGTC | 3′ PBS |
| 1906 | GAGGTCC | 3′ PBS |
| 1907 | GAGGTCCT | 3′ PBS |
| 1908 | GAGGTCCTT | 3′ PBS |
| 1909 | GAGGTCCTTG (SEQ ID NO: 1909) | 3′ PBS |
| 1910 | GAGGTCCTTGG (SEQ ID NO: 1910) | 3′ PBS |
| 1911 | GAGGTCCTTGGC (SEQ ID NO: 1911) | 3′ PBS |
| 1912 | GAGGTCCTTGGCA (SEQ ID NO: 1912) | 3′ PBS |
| 1913 | GAGGTCCTTGGCAA (SEQ ID NO: 1913) | 3′ PBS |
| 1914 | GAGGTCCTTGGCAAG (SEQ ID NO: 1914) | 3′ PBS |
| 1915 | GAGGTCCTTGGCAAGA (SEQ ID NO: 1915) | 3′ PBS |
| 1916 | GAGGTCCTTGGCAAGAC (SEQ ID NO: 1916) | 3′ PBS |
| 1917 | GAGGTCCTTGGCAAGACC (SEQ ID NO: 1917) | 3′ PBS |
| 1918 | GAGGTCCTTGGCAAGACCC (SEQ ID NO: 1918) | 3′ PBS |
| 1919 | GTCTTGCCAAGGACCTCAGCGTTTTAGAGCTAGA | 3′ pegRNA |
| | AATAGCAAGTTAAAATAAGGCTAGTCCGTTATC | |
| | AACTTGAAAAAGTGGCACCGAGTCGGTGCATGA | |
| | TCCTGACGACGGAGACCGCCGTCGTCGACAAGC | |
| | CGAGGTCCTTGGC (SEQ ID NO: 1919) | |
| 1920 | GTCTTGCCAAGGACCTCAGCGTTTTAGAGCTAGA | 3′ pegRNA, |
| | AATAGCAAGTTAAAATAAGGCTAGTCCGTTATC | transcription |
| | AACTTGAAAAAGTGGCACCGAGTCGGTGCATGA | adaptation |
| | TCCTGACGACGGAGACCGCCGTCGTCGACAAGC | (3′ TTTTTTT) |
| | CGAGGTCCTTGGCTTTTTTT (SEQ ID NO: 1920) | |
| 1921 | GTCTTGCCAAGGACCTCAGCGTTTTAGAGCTAGA | 3′ pegRNA |
| | AATAGCAAGTTAAAATAAGGCTAGTCCGTTATC | |
| | AACTTGAAAAAGTGGCACCGAGTCGGTGCATGA | |
| | TCCTGACGACGGAGACCGCCGTCGTCGACAAGC | |
| | CGAGGTCCTTG (SEQ ID NO: 1921) | |
| 1922 | GTCTTGCCAAGGACCTCAGCGTTTTAGAGCTAGA | 3′ pegRNA, |
| | AATAGCAAGTTAAAATAAGGCTAGTCCGTTATC | transcription |
| | AACTTGAAAAAGTGGCACCGAGTCGGTGCATGA | adaptation |
| | TCCTGACGACGGAGACCGCCGTCGTCGACAAGC | (3 ′TTTTTTT) |
| | CGAGGTCCTTGTTTTTTT (SEQ ID NO: 1922) | |

TABLE 54
Exemplary 3′ PEgRNA and component sequence

| Sequence | | |
|---|---|---|
| number | Sequence | Description |
| 1923 | CACAGCATTTCCATCACATC (SEQ ID NO: 1923) | 3′ Spacer |
| 1924 | AGCATTTCCATCACATC (SEQ ID NO: 1924) | 3′ Spacer |
| 1925 | CAGCATTTCCATCACATC (SEQ ID NO: 1925) | 3′ Spacer |
| 1926 | ACAGCATTTCCATCACATC (SEQ ID NO: 1926) | 3′ Spacer |
| 1927 | ACACAGCATTTCCATCACATC (SEQ ID NO: 1927) | 3′ Spacer |
| 1928 | GACACAGCATTTCCATCACATC (SEQ ID NO: 1928) | 3′ Spacer |
| 397 | GTGAT | 3′ PBS |
| 1929 | GTGATG | 3′ PBS |
| 1930 | GTGATGG | 3′ PBS |
| 1931 | GTGATGGA | 3′ PBS |
| 1932 | GTGATGGAA | 3′ PBS |
| 1933 | GTGATGGAAA (SEQ ID NO: 1933) | 3′ PBS |
| 1934 | GTGATGGAAAT (SEQ ID NO: 1934) | 3′ PBS |
| 1935 | GTGATGGAAATG (SEQ ID NO: 1935) | 3′ PBS |
| 1936 | GTGATGGAAATGC (SEQ ID NO: 1936) | 3′ PBS |
| 1937 | GTGATGGAAATGCT (SEQ ID NO: 1937) | 3′ PBS |
| 1938 | GTGATGGAAATGCTG (SEQ ID NO: 1938) | 3′ PBS |
| 1939 | GTGATGGAAATGCTGT (SEQ ID NO: 1939) | 3′ PBS |
| 1940 | GTGATGGAAATGCTGTG (SEQ ID NO: 1940) | 3′ PBS |
| 1941 | GTGATGGAAATGCTGTGT (SEQ ID NO: 1941) | 3′ PBS |
| 1942 | GTGATGGAAATGCTGTGTC (SEQ ID NO: 1942) | 3′ PBS |
| 1943 | CACAGCATTTCCATCACATCGTTTTAGAGCTAGA | 3′ pegRNA |
| | AATAGCAAGTTAAAATAAGGCTAGTCCGTTATC | |
| | AACTTGAAAAAGTGGCACCGAGTCGGTGCATGA | |
| | TCCTGACGACGGAGACCGCCGTCGTCGACAAGC | |
| | CGTGATGGAAATG (SEQ ID NO: 1943) | |
| 1944 | GCACAGCATTTCCATCACATCGTTTTAGAGCTAG | 3′ pegRNA, |
| | AAATAGCAAGTTAAAATAAGGCTAGTCCGTTAT | transcription |
| | CAACTTGAAAAAGTGGCACCGAGTCGGTGCATG | adaptation |
| | ATCCTGACGACGGAGACCGCCGTCGTCGACAAG | (5′ G, 3′ TTTTTTT) |
| | CCGTGATGGAAATGTTTTTTT (SEQ ID NO: 1944) | |
| 1945 | CACAGCATTTCCATCACATCGTTTTAGAGCTAGA | 3′ pegRNA |
| | AATAGCAAGTTAAAATAAGGCTAGTCCGTTATC | |
| | AACTTGAAAAAGTGGCACCGAGTCGGTGCATGA | |
| | TCCTGACGACGGAGACCGCCGTCGTCGACAAGC | |
| | CGTGATGGAAA (SEQ ID NO: 1945) | |
| 1946 | GCACAGCATTTCCATCACATCGTTTTAGAGCTAG | 3′ pegRNA, |
| | AAATAGCAAGTTAAAATAAGGCTAGTCCGTTAT | transcription |
| | CAACTTGAAAAAGTGGCACCGAGTCGGTGCATG | adaptation |
| | ATCCTGACGACGGAGACCGCCGTCGTCGACAAG | (5′ G, 3′ TTTTTTT) |
| | CCGTGATGGAAATTTTTTT (SEQ ID NO: 1946) | |

TABLE 55
Exemplary 3′ PEgRNA and component sequence

| Sequence | | |
|---|---|---|
| number | Sequence | Description |
| 1947 | CTGCTGAAGTCCAGAAGATT (SEQ ID NO: 1947) | 3′ Spacer |
| 1948 | CTGAAGTCCAGAAGATT (SEQ ID NO: 1948) | 3′ Spacer |
| 1949 | GCTGAAGTCCAGAAGATT (SEQ ID NO: 1949) | 3′ Spacer |
| 1950 | TGCTGAAGTCCAGAAGATT (SEQ ID NO: 1950) | 3′ Spacer |
| 1951 | CCTGCTGAAGTCCAGAAGATT (SEQ ID NO: 1951) | 3′ Spacer |
| 1952 | TCCTGCTGAAGTCCAGAAGATT (SEQ ID NO: | 3′ Spacer |
| | 1952) | |
| 1953 | CTTCT | 3′ PBS |
| 1954 | CTTCTG | 3′ PBS |
| 1955 | CTTCTGG | 3′ PBS |
| 1956 | CTTCTGGA | 3′ PBS |
| 1957 | CTTCTGGAC | 3′ PBS |
| 1958 | CTTCTGGACT (SEQ ID NO: 1958) | 3′ PBS |
| 1959 | CTTCTGGACTT (SEQ ID NO: 1959) | 3′ PBS |
| 1960 | CTTCTGGACTTC (SEQ ID NO: 1960) | 3′ PBS |
| 1961 | CTTCTGGACTTCA (SEQ ID NO: 1961) | 3′ PBS |
| 1962 | CTTCTGGACTTCAG (SEQ ID NO: 1962) | 3′ PBS |
| 1963 | CTTCTGGACTTCAGC (SEQ ID NO: 1963) | 3′ PBS |
| 1964 | CTTCTGGACTTCAGCA (SEQ ID NO: 1964) | 3′ PBS |
| 1965 | CTTCTGGACTTCAGCAG (SEQ ID NO: 1965) | 3′ PBS |
| 1966 | CTTCTGGACTTCAGCAGG (SEQ ID NO: 1966) | 3′ PBS |
| 1967 | CTTCTGGACTTCAGCAGGA (SEQ ID NO: 1967) | 3′ PBS |
| 1968 | CTGCTGAAGTCCAGAAGATTGTTTTAGAGCTAG | 3′ pegRNA |
| | AAATAGCAAGTTAAAATAAGGCTAGTCCGTTAT | |
| | CAACTTGAAAAAGTGGCACCGAGTCGGTGCATG | |
| | ATCCTGACGACGGAGACCGCCGTCGTCGACAAG | |
| | CCCTTCTGGACTTC (SEQ ID NO: 1968) | |
| 1969 | GCTGCTGAAGTCCAGAAGATTGTTTTAGAGCTA | 3′ pegRNA, |
| | GAAATAGCAAGTTAAAATAAGGCTAGTCCGTTA | transcription |
| | TCAACTTGAAAAAGTGGCACCGAGTCGGTGCAT | adaptation |
| | GATCCTGACGACGGAGACCGCCGTCGTCGACAA | (5′ G, 3′ TTTTTTT) |
| | GCCCTTCTGGACTTCTTTTTTT (SEQ ID NO: 1969) | |
| 1970 | CTGCTGAAGTCCAGAAGATTGTTTTAGAGCTAG | 3′ pegRNA |
| | AAATAGCAAGTTAAAATAAGGCTAGTCCGTTAT | |
| | CAACTTGAAAAAGTGGCACCGAGTCGGTGCATG | |
| | ATCCTGACGACGGAGACCGCCGTCGTCGACAAG | |
| | CCCTTCTGGACT (SEQ ID NO: 1970) | |
| 1971 | GCTGCTGAAGTCCAGAAGATTGTTTTAGAGCTA | 3′ pegRNA, |
| | GAAATAGCAAGTTAAAATAAGGCTAGTCCGTTA | transcription |
| | TCAACTTGAAAAAGTGGCACCGAGTCGGTGCAT | adaptation |
| | GATCCTGACGACGGAGACCGCCGTCGTCGACAA | (5′ G, 3′ TTTTTTT) |
| | GCCCTTCTGGACTTTTTTTT (SEQ ID NO: 1971) | |

TABLE 56
Exemplary RTTs having region of complementarity to each other

| RTT | | | Comple- | Comple- | | |
|---|---|---|---|---|---|---|
| Pair | | | mentarity | mentarity | Insert | Insert |
| ing | | | region | region | (RD) | (RD) |
| NO | RTT1 sequence | RTT2 sequence | Length | GC% | length | GC% |
| 1 | GGCTTGTCGAC | ATGATCCTGA | 38 | 63% | 38 | 63% |
| | GACGGCGGTCT | CGACGGAGA | | | | |
| | CCGTCGTCAGG | CCGCCGTCGT | | | | |
| | ATCAT (SEQ ID | CGACAAGCC | | | | |
| | NO: 1972) | (SEQ ID NO: | | | | |
| | | 2071) | | | | |
| 2 | TAAGTCAAATG | AAAGTCTCAT | 18 | 28% | 18 | 28% |
| | AGACTTT (SEQ | TTGACTTA | | | | |
| | ID NO: 1973) | (SEQ ID NO: | | | | |
| | | 2072) | | | | |
| 3 | AATTTCAAGAT | AGGCAGGAT | 18 | 39% | 18 | 39% |
| | CCTGCCT (SEQ | CTTGAAATT | | | | |
| | ID NO: 1974) | (SEQ ID NO: | | | | |
| | | 2073) | | | | |
| 4 | TTGCTCTCTGC | GTACATGGCA | 18 | 50% | 18 | 50% |
| | CATGTAC (SEQ | GAGAGCAA | | | | |
| | ID NO: 1975) | (SEQ ID NO: | | | | |
| | | 2074) | | | | |
| 5 | ACCTTTGGCCG | AGAACGGCC | 15 | 53% | 15 | 53% |
| | TTCT (SEQ ID | AAAGGT (SEQ | | | | |
| | NO: 1976) | ID NO: 2075) | | | | |
| 6 | TCTGCCCTCCT | ACCCAAGAG | 18 | 61% | 18 | 61% |
| | CTTGGGT (SEQ | GAGGGCAGA | | | | |
| | ID NO: 1977) | (SEQ ID NO: | | | | |
| | | 2076) | | | | |
| 7 | ATGTACGGGCC | GGACGGCCC | 15 | 67% | 15 | 67% |
| | GTCC (SEQ ID | GTACAT (SEQ | | | | |
| | NO: 1978) | ID NO: 2077) | | | | |
| 8 | GGCCTGGACGC | AGGCCTGGCG | 18 | 78% | 18 | 78% |
| | CAGGCCT (SEQ | TCCAGGCC | | | | |
| | ID NO: 1979) | (SEQ ID NO: | | | | |
| | | 2078) | | | | |
| 9 | TGCCGCACGGC | AGCCGCCGTG | 15 | 80% | 15 | 80% |
| | GGCT (SEQ ID | CGGCA (SEQ | | | | |
| | NO: 1980) | ID NO: 2079) | | | | |
| 10 | TTGGAGTTTGC | TCATACACAG | 22 | 41% | 22 | 41% |
| | TCTGTGTATGA | AGCAAACTCC | | | | |
| | (SEQ ID NO: | AA (SEQ ID | | | | |
| | 1981) | NO: 2080) | | | | |
| 11 | TTTACACTAGA | ACAGCACCAT | 20 | 40% | 20 | 40% |
| | TGGTGCTGT | CTAGTGTAAA | | | | |
| | (SEQ ID NO: | (SEQ ID NO: | | | | |
| | 1982) | 2081) | | | | |
| 12 | ACTTCACATCC | CTCGTCACTG | 20 | 50% | 20 | 50% |
| | AGTGACGAG | GATGTGAAGT | | | | |
| | (SEQ ID NO: | (SEQ ID NO: | | | | |
| | 1983) | 2082) | | | | |
| 13 | GCGGTATCACC | TTGATGTCGT | 22 | 50% | 22 | 50% |
| | TACGACATCAA | AGGTGATACC | | | | |
| | (SEQ ID NO: | GC (SEQ ID | | | | |
| | 1984) | NO: 2083) | | | | |
| 14 | CTGCCCCTGAG | GGATCGTCCC | 20 | 70% | 20 | 70% |
| | GGACGATCC | TCAGGGGCA | | | | |
| | (SEQ ID NO: | G (SEQ ID | | | | |
| | 1985) | NO: 2084) | | | | |
| 15 | GGGTCTGATGC | TCGTGGTCTC | 23 | 65% | 23 | 65% |
| | CCGAGACCACG | GGGCATCAG | | | | |
| | A (SEQ ID NO: | ACCC (SEQ ID | | | | |
| | 1986) | NO: 2085) | | | | |
| 16 | GCCCCACGGGC | CCGCACTCGG | 20 | 85% | 20 | 85% |
| | CGAGTGCGG | CCCGTGGGGC | | | | |
| | (SEQ ID NO: | (SEQ ID NO: | | | | |
| | 1987) | 2086) | | | | |
| 17 | TAACTGCTCTA | GATTTGATAA | 30 | 30% | 30 | 30% |
| | TATACGAGATT | TCTCGTATAT | | | | |
| | ATCAAATC | AGAGCAGTTA | | | | |
| | (SEQ ID NO: | (SEQ ID NO: | | | | |
| | 1988) | 2087) | | | | |
| 18 | GGTAACGTAAT | GTGTCTCATG | 30 | 40% | 30 | 40% |
| | ACAAGGAAAC | TTTCCTTGTA | | | | |
| | ATGAGACAC | TTACGTTACC | | | | |
| | (SEQ ID NO: | (SEQ ID NO: | | | | |
| | 1989) | 2088) | | | | |
| 19 | CAAGTTGTGCC | GTAATCCAAG | 30 | 50% | 30 | 50% |
| | CCTAGTGAGCT | CTCACTAGGG | | | | |
| | TGGATTAC | GCACAACTTG | | | | |
| | (SEQ ID NO: | (SEQ ID NO: | | | | |
| | 1990) | 2089) | | | | |
| 20 | GCGCGAACCTG | CTATCATGCA | 30 | 60% | 30 | 60% |
| | GGATCGCCATG | TGGCGATCCC | | | | |
| | CATGATAG | AGGTTCGCGC | | | | |
| | (SEQ ID NO: | (SEQ ID NO: | | | | |
| | 1991) | 2090) | | | | |
| 22 | TTTCCAAGATT | GGTAATAGCA | 38 | 42% | 38 | 42% |
| | TGCAACCGGCA | TACAGTTGCC | | | | |
| | ACTGTATGCTA | GGTTGCAAAT | | | | |
| | TTACC (SEQ ID | CTTGGAAA | | | | |
| | NO: 1993) | (SEQ ID NO: | | | | |
| | | 2092) | | | | |
| 23 | TATTGTTCCGG | TGTAATCCGA | 38 | 42% | 38 | 42% |
| | TTTATCACGAA | GTACGCTTCG | | | | |
| | GCGTACTCGGA | TGATAAACCG | | | | |
| | TTACA (SEQ ID | GAACAATA | | | | |
| | NO: 1994) | (SEQ ID NO: | | | | |
| | | 2093) | | | | |
| 24 | TATCGCACCAC | GATAAGTATT | 38 | 42% | 38 | 42% |
| | CCTATGCGTTC | GATATGGAAC | | | | |
| | CATATCAATAC | GCATAGGGTG | | | | |
| | TTATC (SEQ ID | GTGCGATA | | | | |
| | NO: 1995) | (SEQ ID NO: | | | | |
| | | 2094) | | | | |
| 25 | TTCGTCTACAG | TGCGGTGAAT | 38 | 42% | 38 | 42% |
| | TATCCTTCTTTC | AGGTTGAAA | | | | |
| | AACCTATTCAC | GAAGGATACT | | | | |
| | CGCA (SEQ ID | GTAGACGAA | | | | |
| | NO: 1996) | (SEQ ID NO: | | | | |
| | | 2095) | | | | |
| 26 | TGTTATGGTGT | GTGGAAATCA | 38 | 42% | 38 | 42% |
| | GAATACTTCAT | TCCGCCATGA | | | | |
| | GGCGGATGATT | AGTATTCACA | | | | |
| | TCCAC (SEQ ID | CCATAACA | | | | |
| | NO: 1997) | (SEQ ID NO: | | | | |
| | | 2096) | | | | |
| 27 | TATGTATACGA | TGGATCGGCA | 38 | 42% | 38 | 42% |
| | AGCCCATGCAA | ATATGTTTGC | | | | |
| | ACATATTGCCG | ATGGGCTTCG | | | | |
| | ATCCA (SEQ ID | TATACATA | | | | |
| | NO: 1998) | (SEQ ID NO: | | | | |
| | | 2097) | | | | |
| 28 | TTACCGTGTCT | GGTAATCGCA | 38 | 42% | 38 | 42% |
| | ACATGGTATTT | AATGCCAAAT | | | | |
| | GGCATTTGCGA | ACCATGTAGA | | | | |
| | TTACC (SEQ ID | CACGGTAA | | | | |
| | NO: 1999) | (SEQ ID NO: | | | | |
| | | 2098) | | | | |
| 29 | TATACAAGGTA | TTCTGTTGGA | 38 | 42% | 38 | 42% |
| | CATATACCAAC | GTGCCCGTTG | | | | |
| | GGGCACTCCAA | GTATATGTAC | | | | |
| | CAGAA (SEQ ID | CTTGTATA | | | | |
| | NO: 2000) | (SEQ ID NO: | | | | |
| | | 2099) | | | | |
| 30 | TTACTGCGTAT | TCCCTCTGGA | 38 | 42% | 38 | 42% |
| | ACTTGGAAATT | CGTGTAAATT | | | | |
| | TACACGTCCAG | TCCAAGTATA | | | | |
| | AGGGA (SEQ ID | CGCAGTAA | | | | |
| | NO: 2001) | (SEQ ID NO: | | | | |
| | | 2100) | | | | |
| 31 | TGTATGTACAG | GGCGGTGCCA | 38 | 53% | 38 | 53% |
| | GGTATACGGTC | TATCCTGACC | | | | |
| | AGGATATGGCA | GTATACCCTG | | | | |
| | CCGCC (SEQ ID | TACATACA | | | | |
| | NO: 2002) | (SEQ ID NO: | | | | |
| | | 2101) | | | | |
| 32 | TCACCCTCGAC | TGTCCGTGCA | 38 | 53% | 38 | 53% |
| | AAGTACAGGTA | TTCGAGTACC | | | | |
| | CTCGAATGCAC | TGTACTTGTC | | | | |
| | GGACA (SEQ ID | GAGGGTGA | | | | |
| | NO: 2003) | (SEQ ID NO: | | | | |
| | | 2102) | | | | |
| 33 | TTCCGAAAGCT | GCTCCAGAAT | 38 | 53% | 38 | 53% |
| | TTCGCTCTCTC | ACGCCTGAGA | | | | |
| | AGGCGTATTCT | GAGCGAAAG | | | | |
| | GGAGC (SEQ ID | CTTTCGGAA | | | | |
| | NO: 2004) | (SEQ ID NO: | | | | |
| | | 2103) | | | | |
| 34 | TGGCGGAGAA | GGAGCAACA | 38 | 53% | 38 | 53% |
| | ATCAATTGCTC | CGGGTTGAGA | | | | |
| | TCAACCCGTGT | GCAATTGATT | | | | |
| | TGCTCC (SEQ ID | TCTCCGCCA | | | | |
| | NO: 2005) | (SEQ ID NO: | | | | |
| | | 2104) | | | | |
| 35 | TCACGTTCCTC | GTATGGGCCT | 38 | 53% | 38 | 53% |
| | ATCTTGTTACC | GCACGTGGTA | | | | |
| | ACGTGCAGGCC | ACAAGATGA | | | | |
| | CATAC (SEQ ID | GGAACGTGA | | | | |
| | NO: 2006) | (SEQ ID NO: | | | | |
| | | 2105) | | | | |
| 36 | TCTCGTCAAGG | GAGCCCACAC | 38 | 53% | 38 | 53% |
| | GAACCAAACAC | ATACTCGTGT | | | | |
| | GAGTATGTGTG | TTGGTTCCCT | | | | |
| | GGCTC (SEQ ID | TGACGAGA | | | | |
| | NO: 2007) | (SEQ ID NO: | | | | |
| | | 2106) | | | | |
| 37 | TATACTGTGCG | GAGTGACAG | 38 | 53% | 38 | 53% |
| | CCGACATACGA | GAAACCCTCG | | | | |
| | GGGTTTCCTGT | TATGTCGGCG | | | | |
| | CACTC (SEQ ID | CACAGTATA | | | | |
| | NO: 2008) | (SEQ ID NO: | | | | |
| | | 2107) | | | | |
| 38 | TCTCTGGAATC | GCCACACCAC | 38 | 53% | 38 | 53% |
| | TTTCGTTTCTCA | ACCCGTGAGA | | | | |
| | CGGGTGTGGTG | AACGAAAGA | | | | |
| | TGGC (SEQ ID | TTCCAGAGA | | | | |
| | NO: 2009) | (SEQ ID NO: | | | | |
| | | 2108) | | | | |
| 39 | TACCTATGTAC | GTGGAGCAC | 38 | 53% | 38 | 53% |
| | ACCAGAACCAG | ACGAGGACT | | | | |
| | TCCTCGTGTGC | GGTTCTGGTG | | | | |
| | TCCAC (SEQ ID | TACATAGGTA | | | | |
| | NO: 2010) | (SEQ ID NO: | | | | |
| | | 2109) | | | | |
| 40 | TACCGGAGGGC | GTGTGGGAG | 38 | 63% | 38 | 63% |
| | GACACTCGAGG | GTCACAACCT | | | | |
| | TTGTGACCTCC | CGAGTGTCGC | | | | |
| | CACAC (SEQ ID | CCTCCGGTA | | | | |
| | NO: 2011) | (SEQ ID NO: | | | | |
| | | 2110) | | | | |
| 41 | TCGTCCCTGTC | TGTGGGCGTA | 38 | 63% | 38 | 63% |
| | CGCGGCCGAGA | CAATACTCTC | | | | |
| | GTATTGTACGC | GGCCGCGGA | | | | |
| | CCACA (SEQ ID | CAGGGACGA | | | | |
| | NO: 2012) | (SEQ ID NO: | | | | |
| | | 2111) | | | | |
| 42 | TCACGATCGAT | GCGGTGGAG | 38 | 63% | 38 | 63% |
| | CGCGCGGAACT | CATACCCAGT | | | | |
| | GGGTATGCTCC | TCCGCGCGAT | | | | |
| | ACCGC (SEQ ID | CGATCGTGA | | | | |
| | NO: 2013) | (SEQ ID NO: | | | | |
| | | 2112) | | | | |
| 43 | TTCTCGGAGGC | GGGACGGAG | 38 | 63% | 38 | 63% |
| | ATGCGGGCATT | CCATGCAAAT | | | | |
| | TGCATGGCTCC | GCCCGCATGC | | | | |
| | GTCCC (SEQ ID | CTCCGAGAA | | | | |
| | NO: 2014) | (SEQ ID NO: | | | | |
| | | 2113) | | | | |
| 44 | TCTCTGCCGCT | GGCGCCTTTG | 38 | 63% | 38 | 63% |
| | ATGCGTTCACG | CCATGGCGTG | | | | |
| | CCATGGCAAAG | AACGCATAGC | | | | |
| | GCGCC (SEQ ID | GGCAGAGA | | | | |
| | NO: 2015) | (SEQ ID NO: | | | | |
| | | 2114) | | | | |
| 45 | TGCATGATGGT | GGATGAGGC | 38 | 63% | 38 | 63% |
| | CCGATGCTGCC | CGAGGCAGG | | | | |
| | TGCCTCGGCCT | CAGCATCGGA | | | | |
| | CATCC (SEQ ID | CCATCATGCA | | | | |
| | NO: 2016) | (SEQ ID NO: | | | | |
| | | 2115) | | | | |
| 46 | TGCGTCGACGC | GACCGCCCGT | 38 | 63% | 38 | 63% |
| | TTGCGCATACA | TCTGCATGTA | | | | |
| | TGCAGAACGGG | TGCGCAAGCG | | | | |
| | CGGTC (SEQ ID | TCGACGCA | | | | |
| | NO: 2017) | (SEQ ID NO: | | | | |
| | | 2116) | | | | |
| 47 | TCAGCTCTGTC | GTCACCAAGG | 38 | 63% | 38 | 63% |
| | GAGGCCCAAGC | ACCACGGCTT | | | | |
| | CGTGGTCCTTG | GGGCCTCGAC | | | | |
| | GTGAC (SEQ ID | AGAGCTGA | | | | |
| | NO: 2018) | (SEQ ID NO: | | | | |
| | | 2117) | | | | |
| 48 | TCTTCCGGTAC | TCGGTTCGGG | 38 | 63% | 38 | 63% |
| | GCGTCTCCTGG | CGAAACCCA | | | | |
| | GTTTCGCCCGA | GGAGACGCG | | | | |
| | ACCGA (SEQ ID | TACCGGAAG | | | | |
| | NO: 2019) | A (SEQ ID NO: | | | | |
| | | 2118) | | | | |
| 49 | TGGCGCACCGC | GTACAGAGCT | 38 | 71% | 38 | 71% |
| | GGCGGTATCTC | CGGCCCGAG | | | | |
| | GGGCCGAGCTC | ATACCGCCGC | | | | |
| | TGTAC (SEQ ID | GGTGCGCCA | | | | |
| | NO: 2020) | (SEQ ID NO: | | | | |
| | | 2119) | | | | |
| 50 | TGCCAATTGAG | GCCGGCAGG | 38 | 71% | 38 | 71% |
| | CCGAACAGCGC | CCCGCAGGCG | | | | |
| | CTGCGGGCCTG | CTGTTCGGCT | | | | |
| | CCGGC (SEQ ID | CAATTGGCA | | | | |
| | NO: 2021) | (SEQ ID NO: | | | | |
| | | 2120) | | | | |
| 51 | TGTCACACATG | GCCGTGCGTC | 38 | 71% | 38 | 71% |
| | CTCCCGGCACC | GGGCGAGGT | | | | |
| | TCGCCCGACGC | GCCGGGAGC | | | | |
| | ACGGC (SEQ ID | ATGTGTGACA | | | | |
| | NO: 2022) | (SEQ ID NO: | | | | |
| | | 2121) | | | | |
| 52 | TGCGGGCGAAC | GAGGTGCCCG | 38 | 71% | 38 | 71% |
| | GCTGCTTTCAG | GTGCCGCTGA | | | | |
| | CGGCACCGGGC | AAGCAGCGTT | | | | |
| | ACCTC (SEQ ID | CGCCCGCA | | | | |
| | NO: 2023) | (SEQ ID NO: | | | | |
| | | 2122) | | | | |
| 53 | TTGCCGCACGC | TTCGCCCGGG | 38 | 71% | 38 | 71% |
| | CGAGCCTTCTC | CCCGTAGAGA | | | | |
| | TACGGGCCCGG | AGGCTCGGCG | | | | |
| | GCGAA (SEQ ID | TGCGGCAA | | | | |
| | NO: 2024) | (SEQ ID NO: | | | | |
| | | 2123) | | | | |
| 54 | TGCCCGCCACG | GGTGACGTTT | 38 | 71% | 38 | 71% |
| | CTGCGTCCAGG | CCCGTCCCTG | | | | |
| | GACGGGAAAC | GACGCAGCGT | | | | |
| | GTCACC (SEQ | GGCGGGCA | | | | |
| | ID NO: 2025) | (SEQ ID NO: | | | | |
| | | 2124) | | | | |
| 55 | TACGGCGGCCG | GCCATGCAGG | 38 | 71% | 38 | 71% |
| | GACCTCTCCGC | CGTAACGCGG | | | | |
| | GTTACGCCTGC | AGAGGTCCG | | | | |
| | ATGGC (SEQ ID | GCCGCCGTA | | | | |
| | NO: 2026) | (SEQ ID NO: | | | | |
| | | 2125) | | | | |
| 56 | TGCTGCGAGAA | GGCAGCGTGC | 38 | 71% | 38 | 71% |
| | CCGCCTATCAG | GCCCGGCTGA | | | | |
| | CCGGGCGCACG | TAGGCGGTTC | | | | |
| | CTGCC (SEQ ID | TCGCAGCA | | | | |
| | NO: 2027) | (SEQ ID NO: | | | | |
| | | 2126) | | | | |
| 57 | TGTGCCCAGGC | GGCAACGCG | 38 | 71% | 38 | 71% |
| | TTTATCGGCCG | CGGCAGGCG | | | | |
| | CCTGCCGCGCG | GCCGATAAA | | | | |
| | TTGCC (SEQ ID | GCCTGGGCAC | | | | |
| | NO: 2028) | A (SEQ ID | | | | |
| | | NO: 2127) | | | | |
| 58 | TGCATCGCGGT | GGAAGGCCC | 38 | 79% | 38 | 79% |
| | GCGGCCCGAGC | GCCGACGGCT | | | | |
| | CGTCGGCGGGC | CGGGCCGCAC | | | | |
| | CTTCC (SEQ ID | CGCGATGCA | | | | |
| | NO: 2029) | (SEQ ID NO: | | | | |
| | | 2128) | | | | |
| 59 | TACGCACACCC | GCCACGCGGC | 38 | 79% | 38 | 79% |
| | GGCCCGGGAGC | CGAGTCGCTC | | | | |
| | GACTCGGCCGC | CCGGGCCGG | | | | |
| | GTGGC (SEQ ID | GTGTGCGTA | | | | |
| | NO: 2030) | (SEQ ID NO: | | | | |
| | | 2129) | | | | |
| 60 | TGGCCGACTCC | GCCGCGCTCC | 38 | 79% | 38 | 79% |
| | GGACCGTCACC | GCGCGAGGT | | | | |
| | TCGCGCGGAGC | GACGGTCCGG | | | | |
| | GCGGC (SEQ ID | AGTCGGCCA | | | | |
| | NO: 2031) | (SEQ ID NO: | | | | |
| | | 2130) | | | | |
| 61 | TGCGCGCCACC | GGTCTCGTGC | 38 | 79% | 38 | 79% |
| | ACGCGCGCGTG | GGAGGCCAC | | | | |
| | GCCTCCGCACG | GCGCGCGTGG | | | | |
| | AGACC (SEQ ID | TGGCGCGCA | | | | |
| | NO: 2032) | (SEQ ID NO: | | | | |
| | | 2131) | | | | |
| 62 | TGGCGGATGAG | GGCCGGCCCT | 38 | 79% | 38 | 79% |
| | CCGCCCAGAAG | CGCCGCCTTC | | | | |
| | GCGGCGAGGG | TGGGCGGCTC | | | | |
| | CCGGCC (SEQ | ATCCGCCA | | | | |
| | ID NO: 2033) | (SEQ ID NO: | | | | |
| | | 2132) | | | | |
| 63 | TGCCAGGTCGA | GCCGTCTTCC | 38 | 79% | 38 | 79% |
| | CCGAGGCCGCG | CGGGCCCGCG | | | | |
| | GGCCCGGGAA | GCCTCGGTCG | | | | |
| | GACGGC (SEQ | ACCTGGCA | | | | |
| | ID NO: 2034) | (SEQ ID NO: | | | | |
| | | 2133) | | | | |
| 64 | TCGCCCGGCGC | TTTCCGGGCT | 38 | 79% | 38 | 79% |
| | CGGGATGTGCG | CCGCGGCGCA | | | | |
| | CCGCGGAGCCC | CATCCCGGCG | | | | |
| | GGAAA (SEQ ID | CCGGGCGA | | | | |
| | NO: 2035) | (SEQ ID NO: | | | | |
| | | 2134) | | | | |
| 65 | TCGAAGCCGCG | GTGCTCGCCG | 38 | 79% | 38 | 79% |
| | GCTGGCGCGGA | GGCACGTCCG | | | | |
| | CGTGCCCGGCG | CGCCAGCCGC | | | | |
| | AGCAC (SEQ ID | GGCTTCGA | | | | |
| | NO: 2036) | (SEQ ID NO: | | | | |
| | | 2135) | | | | |
| 66 | TCCGTACGGGC | GCTGCCCGGC | 38 | 79% | 38 | 79% |
| | CCAGGGTACGC | ACGCGGGCGT | | | | |
| | CCGCGTGCCGG | ACCCTGGGCC | | | | |
| | GCAGC (SEQ ID | CGTACGGA | | | | |
| | NO: 2037) | (SEQ ID NO: | | | | |
| | | 2136) | | | | |
| 67 | TCCGCCTCTTA | GCGGCCCACA | 23 | 65% | 23 | 65% |
| | TCTGTGGGCCG | GATAAGAGG | | | | |
| | C (SEQ ID NO: | CGGA (SEQ ID | | | | |
| | 2038) | NO: 2137) | | | | |
| 68 | TGCCAACCGTC | TCGCATGGAC | 23 | 65% | 23 | 65% |
| | GGGTCCATGCG | CCGACGGTTG | | | | |
| | A (SEQ ID NO: | GCA (SEQ ID | | | | |
| | 2039) | NO: 2138) | | | | |
| 69 | TTCGAGCGCAC | GGCTTGTTGC | 23 | 65% | 23 | 65% |
| | CCGCAACAAGC | GGGTGCGCTC | | | | |
| | C (SEQ ID NO: | GAA (SEQ ID | | | | |
| | 2040) | NO: 2139) | | | | |
| 70 | TTCGCGCAGCA | GGTTCGCAAC | 23 | 65% | 23 | 65% |
| | GGGTTGCGAAC | CCTGCTGCGC | | | | |
| | C (SEQ ID NO: | GAA (SEQ ID | | | | |
| | 2041) | NO: 2140) | | | | |
| 71 | TTTGGCCGGTG | GTACCTGTCC | 23 | 65% | 23 | 65% |
| | CGGGACAGGTA | CGCACCGGCC | | | | |
| | C (SEQ ID NO: | AAA (SEQ ID | | | | |
| | 2042) | NO: 2141) | | | | |
| 72 | TCGTTTGGCGA | GGGAGGAGG | 23 | 65% | 23 | 65% |
| | TGGCCTCCTCC | CCATCGCCAA | | | | |
| | C (SEQ ID NO: | ACGA (SEQ ID | | | | |
| | 2043) | NO: 2142) | | | | |
| 73 | TCTCGGCGAGC | GACACGTAG | 23 | 65% | 23 | 65% |
| | CGTCTACGTGT | ACGGCTCGCC | | | | |
| | C (SEQ ID NO: | GAGA (SEQ ID | | | | |
| | 2044) | NO: 2143) | | | | |
| 75 | TGCCCAGTCCG | TGCGCAGAG | 23 | 65% | 23 | 65% |
| | TGTCTCTGCGC | ACACGGACTG | | | | |
| | A (SEQ ID NO: | GGCA (SEQ ID | | | | |
| | 2046) | NO: 2145) | | | | |
| 76 | TGCGTTTGTGC | TGATCTGTGG | 53 | 62% | 53 | 62% |
| | AATGGGCGGCG | CGATACATGC | | | | |
| | CAGTGGGCCGC | GCGGCCCACT | | | | |
| | GCATGTATCGC | GCGCCGCCCA | | | | |
| | CACAGATCA | TTGCACAAAC | | | | |
| | (SEQ ID NO: | GCA (SEQ ID | | | | |
| | 2047) | NO: 2146) | | | | |
| 77 | TCGGAGGCCAC | GCCCGACATC | 53 | 62% | 53 | 62% |
| | GGTCGCCACAG | CATAGTGAAA | | | | |
| | CAACGTGGCTG | CAGCCACGTT | | | | |
| | TTTCACTATGG | GCTGTGGCGA | | | | |
| | ATGTCGGGC | CCGTGGCCTC | | | | |
| | (SEQ ID NO: | CGA (SEQ ID | | | | |
| | 2048) | NO: 2147) | | | | |
| 78 | TCTCGGTCACG | TTGGAGTAGC | 53 | 62% | 53 | 62% |
| | CACGGCGCAGC | AATGCGTGTC | | | | |
| | TCGGACAACCC | GGGTTGTCCG | | | | |
| | GACACGCATTG | AGCTGCGCCG | | | | |
| | CTACTCCAA | TGCGTGACCG | | | | |
| | (SEQ ID NO: | AGA (SEQ ID | | | | |
| | 2049) | NO: 2148) | | | | |
| 79 | TTGCTCCGTGG | TCCCTTGCGC | 53 | 62% | 53 | 62% |
| | TATCGGTCCCG | GGCGGCAAA | | | | |
| | AGCCATATCAG | CCTGATATGG | | | | |
| | GTTTGCCGCCG | CTCGGGACCG | | | | |
| | CGCAAGGGA | ATACCACGGA | | | | |
| | (SEQ ID NO: | GCAA (SEQ ID | | | | |
| | 2050) | NO: 2149) | | | | |
| 80 | TTGGGTGTGGC | GGTCCTCTCC | 68 | 63% | 68 | 63% |
| | GCCAACGGGA | ACCACAACG | | | | |
| | GTGCGGCCTGG | GCCGCAATAA | | | | |
| | GTACCTATTAT | TAGGTACCCA | | | | |
| | TGCGGCCGTTG | GGCCGCACTC | | | | |
| | TGGTGGAGAGG | CCGTTGGCGC | | | | |
| | ACC (SEQ ID | CACACCCAA | | | | |
| | NO: 2051) | (SEQ ID NO: | | | | |
| | | 2150) | | | | |
| 81 | TCGCTGGCGTC | TGGTGCAGCC | 68 | 63% | 68 | 63% |
| | GTACGCGGAGT | AGGGTCTGCT | | | | |
| | GTGCAAGAGCT | TGACTTTCGC | | | | |
| | GGGTGGCGAA | CACCCAGCTC | | | | |
| | AGTCAAGCAGA | TTGCACACTC | | | | |
| | CCCTGGCTGCA | CGCGTACGAC | | | | |
| | CCA (SEQ ID | GCCAGCGA | | | | |
| | NO: 2052) | (SEQ ID NO: | | | | |
| | | 2151) | | | | |
| 82 | TCGGCTGTGGC | TGTTCCTGAC | 68 | 63% | 68 | 63% |
| | AGGCCGGGAA | GGCTGGGTAG | | | | |
| | GCTCCATGTAC | CTTCGCCTTG | | | | |
| | ACGCTGCAAGG | CAGCGTGTAC | | | | |
| | CGAAGCTACCC | ATGGAGCTTC | | | | |
| | AGCCGTCAGGA | CCGGCCTGCC | | | | |
| | ACA (SEQ ID | ACAGCCGA | | | | |
| | NO: 2053) | (SEQ ID NO: | | | | |
| | | 2152) | | | | |
| 83 | TTACCGGGCAG | GACGCGGAA | 68 | 63% | 68 | 63% |
| | TGTCCTTTCTG | GCCTTCCTCC | | | | |
| | CGCAGCAGGGT | TGCGTAGTCC | | | | |
| | CGTACCGGACT | GGTACGACCC | | | | |
| | ACGCAGGAGG | TGCTGCGCAG | | | | |
| | AAGGCTTCCGC | AAAGGACAC | | | | |
| | GTC (SEQ ID | TGCCCGGTAA | | | | |
| | NO: 2054) | (SEQ ID NO: | | | | |
| | | 2153) | | | | |
| 84 | TACAACGCGGA | GCATACCACC | 68 | 63% | 68 | 63% |
| | TCAGGGCATCC | CATCTCGGGA | | | | |
| | ATCCACAGCGT | CACCGCCGTT | | | | |
| | GCGCGAACGGC | CGCGCACGCT | | | | |
| | GGTGTCCCGAG | GTGGATGGAT | | | | |
| | ATGGGTGGTAT | GCCCTGATCC | | | | |
| | GC (SEQ ID NO: | GCGTTGTA | | | | |
| | 2055) | (SEQ ID NO: | | | | |
| | | 2154) | | | | |
| 85 | TCCTCTCGCCT | GGTAGACCGC | 68 | 63% | 68 | 63% |
| | GAATCGGACTG | CTCCGGAGGC | | | | |
| | GACAGCTTCGT | TCTTCGAGCC | | | | |
| | GGGATGGCTCG | ATCCCACGAA | | | | |
| | AAGAGCCTCCG | GCTGTCCAGT | | | | |
| | GAGGCGGTCTA | CCGATTCAGG | | | | |
| | CC (SEQ ID NO: | CGAGAGGA | | | | |
| | 2056) | (SEQ ID NO: | | | | |
| | | 2155) | | | | |
| 86 | TTGCCGACTGA | GGCTGCGCGG | 68 | 63% | 68 | 63% |
| | TACTGCGTCCT | GCGTCCGCTT | | | | |
| | TACGCCCGATT | GCACCCTTGT | | | | |
| | GCGTTACAAGG | AACGCAATCG | | | | |
| | GTGCAAGCGGA | GGCGTAAGG | | | | |
| | CGCCCGCGCAG | ACGCAGTATC | | | | |
| | CC (SEQ ID NO: | AGTCGGCAA | | | | |
| | 2057) | (SEQ ID NO: | | | | |
| | | 2156) | | | | |
| 87 | TCCCGGAGCGA | GGAAGACAG | 68 | 63% | 68 | 63% |
| | AACCGGCCAAC | CCGCCACATA | | | | |
| | GAAGCGAAAG | TCCACTGCAG | | | | |
| | GGTGGCCCTGC | GGCCACCCTT | | | | |
| | AGTGGATATGT | TCGCTTCGTT | | | | |
| | GGCGGCTGTCT | GGCCGGTTTC | | | | |
| | TCC (SEQ ID NO: | GCTCCGGGA | | | | |
| | 2058) | (SEQ ID NO: | | | | |
| | | 2157) | | | | |
| 88 | TCCAGCAAGAG | GAAATCGAG | 68 | 63% | 68 | 63% |
| | GCAACCCACCC | CGAGGTTCCG | | | | |
| | ACGCGAAGCCA | TCGTCGGCGC | | | | |
| | CCACTTGCGCC | AAGTGGTGGC | | | | |
| | GACGACGGAA | TTCGCGTGGG | | | | |
| | CCTCGCTCGAT | TGGGTTGCCT | | | | |
| | TTC (SEQ ID NO: | CTTGCTGGA | | | | |
| | 2059) | (SEQ ID NO: | | | | |
| | | 2158) | | | | |
| 89 | TCCGAGGAGGA | GCGTGACCTC | 83 | 63% | 83 | 63% |
| | CAGAGCCAAG | GCCGCTTCAA | | | | |
| | GACAGCCCTTC | GGCCGCGCAC | | | | |
| | CTCAATCTACT | GTCGATCGTG | | | | |
| | CACGATCGACG | AGTAGATTGA | | | | |
| | TGCGCGGCCTT | GGAAGGGCT | | | | |
| | GAAGCGGCGA | GTCCTTGGCT | | | | |
| | GGTCACGC | CTGTCCTCCT | | | | |
| | (SEQ ID NO: | CGGA (SEQ ID | | | | |
| | 2060) | NO: 2159) | | | | |
| 90 | TCCCGCCTTCA | TCCCATCCAG | 83 | 63% | 83 | 63% |
| | CACCCTCGAGA | TACAGCCCGG | | | | |
| | TACTGCGCGCT | TCCGACTGTG | | | | |
| | CAGCCTTCACA | CGCGATAGGT | | | | |
| | CCTATCGCGCA | GTGAAGGCTG | | | | |
| | CAGTCGGACCG | AGCGCGCAGT | | | | |
| | GGCTGTACTGG | ATCTCGAGGG | | | | |
| | ATGGGA (SEQ | TGTGAAGGCG | | | | |
| | ID NO: 2061) | GGA (SEQ ID | | | | |
| | | NO: 2160) | | | | |
| 91 | TTGCAGCCAAT | GATAGCTTGG | 83 | 63% | 83 | 63% |
| | TGTGGCAACAC | CCAGCAAGTG | | | | |
| | CGGAAGCCAA | GCGCGCCCAC | | | | |
| | GGCACAGGATG | CGGCGATCGG | | | | |
| | CCGATCGCCGG | CATCCTGTGC | | | | |
| | TGGGCGCGCCA | CTTGGCTTCC | | | | |
| | CTTGCTGGCCA | GGTGTTGCCA | | | | |
| | AGCTATC (SEQ | CAATTGGCTG | | | | |
| | ID NO: 2062) | CAA (SEQ ID | | | | |
| | | NO: 2161) | | | | |
| 92 | TTGGCCAAAGA | GGCTGTGCGC | 83 | 63% | 83 | 63% |
| | CACCACGAGAA | GCCTTCGTCG | | | | |
| | ATGCCCAATCA | CAGTCCGCTT | | | | |
| | GGGTGGCAGG | CGTGGCAGTC | | | | |
| | GACTGCCACGA | CCTGCCACCC | | | | |
| | AGCGGACTGCG | TGATTGGGCA | | | | |
| | ACGAAGGCGC | TTTCTCGTGG | | | | |
| | GCACAGCC | TGTCTTTGGC | | | | |
| | (SEQ ID NO: | CAA (SEQ ID | | | | |
| | 2063) | NO: 2162) | | | | |
| 93 | TTACTGAGTGG | TGGGATGACC | 83 | 63% | 83 | 63% |
| | CCCGTACGCGC | AGAAGACGG | | | | |
| | AGGGCCGTCGG | ACCATCTGCC | | | | |
| | CAGAACTCAGT | GTCGGTCGAC | | | | |
| | GTCGACCGACG | ACTGAGTTCT | | | | |
| | GCAGATGGTCC | GCCGACGGCC | | | | |
| | GTCTTCTGGTC | CTGCGCGTAC | | | | |
| | ATCCCA (SEQ | GGGCCACTCA | | | | |
| | ID NO: 2064) | GTAA (SEQ ID | | | | |
| | | NO: 2163) | | | | |
| 94 | TCGCGGCCTGC | GGCTCCGGCG | 83 | 63% | 83 | 63% |
| | GGTTCGGTACG | ACTTTCGAAG | | | | |
| | TTGCGTTTCAA | CTCCGCAAGC | | | | |
| | ACCGGTCTTCC | AGACGTGCA | | | | |
| | TGCACGTCTGC | GGAAGACCG | | | | |
| | TTGCGGAGCTT | GTTTGAAACG | | | | |
| | CGAAAGTCGCC | CAACGTACCG | | | | |
| | GGAGCC (SEQ | AACCGCAGG | | | | |
| | ID NO: 2065) | CCGCGA (SEQ | | | | |
| | | ID NO: 2164) | | | | |
| 95 | TGGCGCCTGAG | TCCACACGGG | 83 | 63% | 83 | 63% |
| | CCGTTTGAAAG | ACACCGGAGT | | | | |
| | AGGCACTCGTG | GGCGTTGCCA | | | | |
| | CCATATTGCCT | GAGGCGTCG | | | | |
| | CGACGCCTCTG | AGGCAATATG | | | | |
| | GCAACGCCACT | GCACGAGTGC | | | | |
| | CCGGTGTCCCG | CTCTTTCAAA | | | | |
| | TGTGGA (SEQ | CGGCTCAGGC | | | | |
| | ID NO: 2066) | GCCA (SEQ ID | | | | |
| | | NO: 2165) | | | | |
| 96 | TCATACGCGGC | GGCACGGCTG | 83 | 63% | 83 | 63% |
| | AATCGCGTCCT | TGCAACGCCG | | | | |
| | TCTGTACGGAC | CCGTCTCTGA | | | | |
| | CCACTACGGTT | CATAGCGGCA | | | | |
| | GCCGCTATGTC | ACCGTAGTGG | | | | |
| | AGAGACGGCG | GTCCGTACAG | | | | |
| | GCGTTGCACAG | AAGGACGCG | | | | |
| | CCGTGCC (SEQ | ATTGCCGCGT | | | | |
| | ID NO: 2067) | ATGA (SEQ ID | | | | |
| | | NO: 2166) | | | | |
| 97 | TCCCACTACCG | GGGTGTACGC | 83 | 63% | 83 | 63% |
| | TCAGACTCGCT | TCCGCTCTCC | | | | |
| | CAGAACAGACC | TTGACAAGGC | | | | |
| | AGATCACGGCG | GGATCCCGCC | | | | |
| | GCGGGATCCGC | GCCGTGATCT | | | | |
| | CTTGTCAAGGA | GGTCTGTTCT | | | | |
| | GAGCGGAGCGT | GAGCGAGTCT | | | | |
| | ACACCC (SEQ | GACGGTAGTG | | | | |
| | ID NO: 2068) | GGA (SEQ ID | | | | |
| | | NO: 2167) | | | | |
| 98 | TGGGCGACTTA | TCGCTCCCAG | 83 | 63% | 83 | 63% |
| | CGATTGGAGCA | GTGTCCTCCT | | | | |
| | TTCTCCTCGGC | CCTCCCAGCG | | | | |
| | TTTGTTGGCTC | GGTCGCGCTG | | | | |
| | AGCGCGACCCG | AGCCAACAA | | | | |
| | CTGGGAGGAG | AGCCGAGGA | | | | |
| | GAGGACACCTG | GAATGCTCCA | | | | |
| | GGAGCGA (SEQ | ATCGTAAGTC | | | | |
| | ID NO: 2069) | GCCCA (SEQ | | | | |
| | | ID NO: 2168) | | | | |
| 99 | ACGATGATGGT | GCACACCATC | 24 | 50% | 24 | 50% |
| | GATGATGGTGT | ATCACCATCA | | | | |
| | GC (SEQ ID NO: | TCGT (SEQ ID | | | | |
| | 2070) | NO: 2169) | | | | |
| 100 | CTACTGACTCC | ACACCCAGA | 29 | 48% | 70 | 47% |
| | TTCAACGACTC | GTCGTTGAAG | | | | |
| | TGGGTGTTACA | GAGTCAGTAG | | | | |
| | GGTTCGCTCAC | GGGCGGCAA | | | | |
| | GCCTA (SEQ ID | ATCTCAAAGA | | | | |
| | NO: 2401) | GT (SEQ ID | | | | |
| | | NO: 2500) | | | | |
| 101 | TGACTCCTTCA | AGAGTCGTTG | 19 | 53% | 70 | 47% |
| | ACGACTCTGGG | AAGGAGTCA | | | | |
| | TGTTACAGGTT | GTAGGGGCG | | | | |
| | CGCTCACGCCT | GCAAATCTCA | | | | |
| | A (SEQ ID | AAGAGT (SEQ | | | | |
| | NO: 2402) | ID NO: 2501) | | | | |
| 102 | GATTTGCCGCC | GTTGAAGGA | 29 | 45% | 93 | 44% |
| | CCTACTGACTC | GTCAGTAGGG | | | | |
| | CTTCAACGACT | GCGGCAAATC | | | | |
| | CTGGGTGTTAC | TCAAAGAGTG | | | | |
| | AGGTTCGCTCA | TGGCCCAGTG | | | | |
| | CGCCTA (SEQ | CTGAAAGTAG | | | | |
| | ID NO: 2403) | CG (SEQ ID | | | | |
| | | NO: 2502) | | | | |
| 103 | GCCGCCCCTAC | AGGAGTCAGT | 19 | 32% | 93 | 41% |
| | TGACTCCTTCA | AGGGGCGGC | | | | |
| | ACGACTCTGGG | AAATCTCAAA | | | | |
| | TGTTACAGGTT | GAGTGTGGCC | | | | |
| | CGCTCACGCCT | CAGTGCTGAA | | | | |
| | A (SEQ ID | AGTAGCG | | | | |
| | NO: 2404) | (SEQ ID | | | | |
| | | NO: 2503) | | | | |
| 104 | GATTTGCCGCC | GTTGAAGGA | 29 | 45% | 47 | 42% |
| | CCTACTGACTC | GTCAGTAGGG | | | | |
| | CTTCAACGACT | GCGGCAAATC | | | | |
| | CTGGG (SEQ ID | TCAAAGAGT | | | | |
| | NO: 2405) | (SEQ ID | | | | |
| | | NO: 2504) | | | | |
| 105 | GCCGCCCCTAC | AGGAGTCAGT | 19 | 32% | 47 | 36% |
| | TGACTCCTTCA | AGGGGCGGC | | | | |
| | ACGACTCTGGG | AAATCTCAAA | | | | |
| | (SEQ ID | GAGT (SEQ ID | | | | |
| | NO: 2406) | NO: 2505) | | | | |
| 106 | ACACTCTTTGA | AGTAGGGGC | 28 | 50% | 70 | 47% |
| | GATTTGCCGCC | GGCAAATCTC | | | | |
| | CCTACTGACTC | AAAGAGTGT | | | | |
| | CTTCAACGACT | GGCCCAGTGC | | | | |
| | CTGGG (SEQ ID | TGAAAGTAGC | | | | |
| | NO: 2407) | G (SEQ ID | | | | |
| | | NO: 2506) | | | | |
| 107 | TCTTTGAGATT | GGGGCGGCA | 20 | 45% | 70 | 47% |
| | TGCCGCCCCTA | AATCTCAAAG | | | | |
| | CTGACTCCTTC | AGTGTGGCCC | | | | |
| | AACGACTCTGG | AGTGCTGAAA | | | | |
| | G (SEQ ID | GTAGCG (SEQ | | | | |
| | NO: 2408) | ID NO: 2507) | | | | |
| 108 | AGCACTGGGCC | AAATCTCAAA | 27 | 52% | 93 | 43% |
| | ACACTCTTTGA | GAGTGTGGCC | | | | |
| | GATTTGCCGCC | CAGTGCTGAA | | | | |
| | CCTACTGACTC | AGTAGCGGC | | | | |
| | CTTCAACGACT | GGACCATGCT | | | | |
| | CTGGG (SEQ ID | TGCATCCTTT | | | | |
| | NO: 2409) | A (SEQ ID | | | | |
| | | NO: 2508) | | | | |
| 109 | TGGGCCACACT | TCAAAGAGTG | 17 | 47% | 93 | 44% |
| | CTTTGAGATTT | TGGCCCAGTG | | | | |
| | GCCGCCCCTAC | CTGAAAGTAG | | | | |
| | TGACTCCTTCA | CGGCGGACC | | | | |
| | ACGACTCTGGG | ATGCTTGCAT | | | | |
| | (SEQ ID | CCTTTA (SEQ | | | | |
| | NO: 2410) | ID NO: 2509) | | | | |
| 110 | AGCACTGGGCC | AAATCTCAAA | 27 | 52% | 47 | 43% |
| | ACACTCTTTGA | GAGTGTGGCC | | | | |
| | GATTTGCCGCC | CAGTGCTGAA | | | | |
| | CCTA (SEQ ID | AGTAGCG | | | | |
| | NO: 2411) | (SEQ ID | | | | |
| | | NO: 2510) | | | | |
| 111 | TGGGCCACACT | TCAAAGAGTG | 17 | 47% | 47 | 44% |
| | CTTTGAGATTT | TGGCCCAGTG | | | | |
| | GCCGCCCCTA | CTGAAAGTAG | | | | |
| | (SEQ ID | CG (SEQ ID | | | | |
| | NO: 2412) | NO: 2511) | | | | |
| 112 | GCCGCTACTTT | GAGTGTGGCC | 29 | 38% | 70 | 43% |
| | CAGCACTGGGC | CAGTGCTGAA | | | | |
| | CACACTCTTTG | AGTAGCGGC | | | | |
| | AGATTTGCCGC | GGACCATGCT | | | | |
| | CCCTA (SEQ ID | TGCATCCTTT | | | | |
| | NO: 2413) | A (SEQ ID | | | | |
| | | NO: 2512) | | | | |
| 113 | TACTTTCAGCA | TGGCCCAGTG | 19 | 47% | 70 | 48% |
| | CTGGGCCACAC | CTGAAAGTAG | | | | |
| | TCTTTGAGATT | CGGCGGACC | | | | |
| | TGCCGCCCCTA | ATGCTTGCAT | | | | |
| | (SEQ ID | CCTTTA (SEQ | | | | |
| | NO: 2414) | ID NO: 2513) | | | | |

TABLE 57A
Exemplary 5′ RTTs

| | Pairing | Exemplary | | |
|---|---|---|---|---|
| | 3′ Spacer | Pairing | | |
| | Group | Spacer | RTT | RTT |
| 5′ RTT Sequence | Number | SEQ ID NO | Length | GC% |
| AAAACTCTGCTGATGGC | 14 | 631 | 20 | 50% |
| CAG | | | | |
| (SEQ ID NO: 2170) | | | | |
| AATTAAAAACTCTGCTG | 14 | 631 | 25 | 40% |
| ATGGCCAG | | | | |
| (SEQ ID NO: 2171) | | | | |
| TCCTAAATTAAAAACTC | 14 | 631 | 30 | 40% |
| TGCTGATGGCCAG | | | | |
| (SEQ ID NO: 2172) | | | | |
| GGGGTGAAGACAAGGGC | 25 | 1017 | 20 | 65% |
| CTC | | | | |
| (SEQ ID NO: 2173) | | | | |
| GTGATGGGGTGAAGACA | 25 | 1017 | 25 | 60% |
| AGGGCCTC | | | | |
| (SEQ ID NO: 2174) | | | | |
| GGGCAGTGATGGGGTGA | 25 | 1017 | 30 | 63% |
| AGACAAGGGCCTC | | | | |
| (SEQ ID NO: 2175) | | | | |
| CTGGCCCCAGAGTCTGT | 29 | 1215 | 20 | 65% |
| GCA | | | | |
| (SEQ ID NO: 2176) | | | | |
| GCTGTCTGGCCCCAGAG | 29 | 1215 | 25 | 64% |
| TCTGTGCA | | | | |
| (SEQ ID NO: 2177) | | | | |
| CCCAAGCTGTCTGGCCC | 29 | 1215 | 30 | 63% |
| CAGAGTCTGTGCA | | | | |
| (SEQ ID NO: 2178) | | | | |

TABLE 57B
Exemplary 3′ RTTs

| | Pairing | Exemplary | | |
|---|---|---|---|---|
| | 3′ | Pairing | | |
| | Spacer | Spacer | | |
| | Group | SEQ | RTT | RTT |
| 3′ RTT Sequence | Number | ID NO | Length | GC% |
| AAATATCTGACCCAGTT | 2 | 101 | 20 | 40% |
| ACG | | | | |
| (SEQ ID NO: 2179) | | | | |
| CAAAGAAATATCTGACC | 2 | 101 | 25 | 40% |
| CAGTTACG | | | | |
| (SEQ ID NO: 2180) | | | | |
| GGGTACAAAGAAATATC | 2 | 101 | 30 | 43% |
| TGACCCAGTTACG | | | | |
| (SEQ ID NO: 2181) | | | | |

[0556] The linker sequences and scaffold sequences used in PEgRNA sequences in Tables 1-55 are provided in Tables 58 and 59, respectively.

TABLE 58
Linker sequences

| Linker | | |
|---|---|---|
| sequence | Linker | |
| number | sequence | Orientation |
| 2238 | GTAGAT | 5′ |
| 2240 | AAGAGT | 5′ |
| 2241 | ATGTTA | 5′ |
| 2242 | ATACGT | 5′ |
| 2243 | TCTGTC | 5′ |
| 2245 | TCCCTC | 5′ |
| 2247 | CCCCGT | 5′ |
| 2248 | ATGTTG | 5′ |
| 2250 | CCCCCC | 5′ |
| 2252 | ATCGAT | 5′ |
| 2257 | CAATCT | 5′ |
| 2239 | AATATC | 3′ |
| 2244 | CCCCCT | 3′ |
| 2246 | CCTCCT | 3′ |
| 2249 | AAGATC | 3′ |
| 2251 | CCCAAT | 3′ |
| 2253 | CCTCCC | 3′ |
| 2254 | ATTGTC | 3′ |
| 2255 | AAAATC | 3′ |
| 2256 | CTCACT | 3′ |
| 2258 | CTCACA | 3′ |

[0557] A PEgRNA may also comprise optional modifiers, e.g., 3′ end modifier region and/or an 5′ end modifier region. In some embodiments, a PEgRNA comprises at least one nucleotide that is not part of a spacer, a gRNA core, or an extension arm. The optional sequence modifiers could be positioned within or between any of the other regions shown, and not limited to being located at the 3′ and 5′ ends. In certain embodiments, the PEgRNA comprises secondary RNA structure, such as, but not limited to, aptamers, hairpins, stem/loops, toeloops, and/or RNA-binding protein recruitment domains (e.g., the MS2 aptamer which recruits and binds to the MS2 coat protein (MS2cp)). In some embodiments, a PEgRNA comprises a short stretch of uracil at the 5′ end or the 3′ end. For example, in some embodiments, a PEgRNA comprising a 3′ extension arm comprises a “UUU” sequence at the 3′ end of the extension arm. In some embodiments, a PEgRNA comprises a toeloop sequence at the 3′ end. In some embodiments, the PEgRNA comprises a 3′ extension arm and a toeloop sequence at the 3′ end of the extension arm. In some embodiments, the PEgRNA comprises a 5′ extension arm and a toeloop sequence at the 5′ end of the extension arm. In some embodiments, the PEgRNA comprises a toeloop element having the sequence 5′-GAAANNNNN-3′, wherein N is any nucleobase. In some embodiments, the secondary RNA structure is positioned within the spacer. In some embodiments, the secondary structure is positioned within the extension arm. In some embodiments, the secondary structure is positioned within the gRNA core. In some embodiments, the secondary structure is positioned between the spacer and the gRNA core, between the gRNA core and the extension arm, or between the spacer and the extension arm. In some embodiments, the secondary structure is positioned between the PBS and the editing template. In some embodiments the secondary structure is positioned at the 3′ end or at the 5′ end of the PEgRNA. In some embodiments, the PEgRNA comprises a transcriptional termination signal at the 3′ end of the PEgRNA. In some embodiments, a PEgRNA comprises up to 50 nucleotides, up to 40 nucleotides, up to 30 nucleotides, up to 20 nucleotides, or up to 10 nucleotides of optional sequence modifiers at either or both of the 3′ and 5′ ends of the PEgRNA. In addition to secondary RNA structures, the PEgRNA may comprise a chemical linker or a poly(N) linker or tail, where “N” can be any nucleobase. In some embodiments, the chemical linker may function to prevent reverse transcription of the gRNA core.

[0558] A PEgRNA of this disclosure, in some embodiments, may include modified nucleotides, e.g., chemically modified DNA or RNA nucleobases, and may include one or more nucleobase analogs (e.g., modifications which might add functionality, such as temperature resilience). In some embodiments, PEgRNAs as described herein may be chemically modified. The phrase “chemical modifications,” as used herein, can include modifications which introduce chemistries which differ from those seen in naturally occurring DNA or RNAs, for example, covalent modifications such as the introduction of modified nucleotides, (e.g., nucleotide analogs, or the inclusion of pendant groups which are not naturally found in DNA or RNA molecules).

[0559] In some embodiments, the PEgRNAs provided in this disclosure may have undergone chemical or biological modifications. Modifications may be made at any position within a PEgRNA, and may include modification to a nucleobase or to a phosphate backbone of the PEgRNA. In some embodiments, chemical modifications can be structure guided modifications. In some embodiments, a chemical modification is at the 5′ end and/or the 3′ end of a PEgRNA. In some embodiments, a chemical modification may be within the spacer, the extension arm, the editing template sequence, or the primer binding site of a PEgRNA. In some embodiments, a chemical modification may be within the spacer or the gRNA core of a PEgRNA. In some embodiments, a chemical modification may be within the 3′ most nucleotides of a PEgRNA. In some embodiments, a chemical modification may be within the 3′ most end of a PEgRNA. In some embodiments, a chemical modification may be within the 5′ most end of a PEgRNA. In some embodiments, a PEgRNA comprises 1, 2, 3, 4, 5, 6, 7, 8, 9, 10 or more chemically modified nucleotides at the 3′ end. In some embodiments, a PEgRNA comprises 1, 2, 3, 4, 5, 6, 7, 8, 9, 10 or more chemically modified nucleotides at the 5′ end. In some embodiments, a PEgRNA comprises 1, 2, 3, 4, or 5 or more chemically modified nucleotides at the 3′ end. In some embodiments, a PEgRNA comprises 1, 2, 3, 4, or 5 more chemically modified nucleotides at the 5′ end. In some embodiments, a PEgRNA comprises 1, 2, or 3 or more chemically modified nucleotides at the 3′ end. In some embodiments, a PEgRNA comprises 1, 2, or 3 or more chemically modified nucleotides at the 5′ end.

[0560] In some embodiments, a PEgRNA comprises 1, 2, 3, 4, 5, 6, 7, 8, 9, 10 or more contiguous chemically modified nucleotides at the 3′ end. In some embodiments, a PEgRNA comprises 1, 2, 3, 4, 5, 6, 7, 8, 9, 10 or more contiguous chemically modified nucleotides at the 5′ end. In some embodiments, a PEgRNA comprises 1, 2, 3, 4, or 5 contiguous chemically modified nucleotides at the 3′ end. In some embodiments, a PEgRNA comprises 1, 2, 3, 4, or 5 contiguous chemically modified nucleotides at the 5′ end. In some embodiments, a PEgRNA comprises 1, 2, or 3 contiguous chemically modified nucleotides at the 3′ end. In some embodiments, a PEgRNA comprises 1, 2, or 3 contiguous chemically modified nucleotides at the 5′ end. In some embodiments, a PEgRNA comprises 3 contiguous chemically modified nucleotides at the 3′ end.

[0561] In some embodiments, a PEgRNA comprises 1, 2, 3, 4, 5, or more chemically modified nucleotides near the 3′ end. In some embodiments, a PEgRNA comprises 3 contiguous chemically modified nucleotides at the 3′ end. In some embodiments, a PEgRNA comprises 3 contiguous chemically modified nucleotides at the 5′ end. In some embodiments, a PEgRNA comprises 1, 2, 3, 4, 5, or more chemically modified nucleotides near the 3′ end. In some embodiments, a PEgRNA comprises 1, 2, 3, 4, 5, or more contiguous chemically modified nucleotides near the 3′ end. In some embodiments, a PEgRNA comprises 1, 2, 3, 4, 5, or more chemically modified nucleotides near the 3′ end, where the 3′ most nucleotide is not modified, and the 1, 2, 3, 4, 5, or more chemically modified nucleotides precede the 3′ most nucleotide in a 5′-to-3′ order. In some embodiments, a PEgRNA comprises 1, 2, 3, 4, 5, 6, 7, 8, 9, 10, 11, 12, 13, 14, 15, 16, 17, 18, 19, 20, 21, 22, 23, 24, 25, 26, 27, 28, 29, 30, 31, 32, 33, 34, 35 or more chemically modified nucleotides near the 3′ end, where the 3′ most nucleotide is not modified, and the 1, 2, 3, 4, 5, 6, 7, 8, 9, 10, 11, 12, 13, 14, 15, 16, 17, 18, 19, 20, 21, 22, 23, 24, 25, 26, 27, 28, 29, 30, 31, 32, 33, 34, 35 or more chemically modified nucleotides precede the 3′ most nucleotide in a 5′-to-3′ order.

[0562] In some embodiments, a PEgRNA comprises one or more chemically modified nucleotides in the gRNA core. In some embodiments, the gRNA core of a PEgRNA may comprise one or more regions of a base paired lower stem, a base paired upper stem, where the lower stem and upper stem may be connected by a bulge comprising unpaired RNAs. The gRNA core may further comprise a nexus distal from the spacer. In some embodiments, the gRNA core comprises one or more chemically modified nucleotides in the lower stem, upper stem, and/or the hairpin regions. In some embodiments, all of the nucleotides in the lower stem, upper stem, and/or the hairpin regions are chemically modified.

[0563] A chemical modification to a PEgRNA can comprise a 2′-O-thionocarbamate-protected nucleoside phosphoramidite, a 2′-O-methyl (M), a 2′-O-methyl 3′phosphorothioate (MS), or a 2′-O-methyl 3′thioPACE (MSP), or any combination thereof. In some embodiments, a chemically modified PEgRNA can comprise a '-O-methyl (M) RNA, a 2′-O-methyl 3′phosphorothioate (MS) RNA, a 2′-O-methyl 3′thioPACE (MSP) RNA, a 2′-F RNA, a phosphorothioate bond modification, any other chemical modifications known in the art, or any combination thereof. A chemical modification may also include, for example, the incorporation of non-nucleotide linkages or modified nucleotides into the PEgRNA (e.g., modifications to one or both of the 3′ and 5′ ends of a guide RNA molecule). Such modifications can include the addition of bases to an RNA sequence, complexing the RNA with an agent (e.g., a protein or a complementary nucleic acid molecule), and inclusion of elements which change the structure of an RNA molecule (e.g., which form secondary structures).

[0564] Disclosed herein, in some embodiments, are compositions, systems, and methods using a prime editing composition. The term “prime editing composition” or “prime editing system” refers to compositions involved in the method of prime editing as described herein. A prime editing composition may include a prime editor, e.g., a prime editor fusion protein, and a PEgRNA. A prime editing composition may further comprise additional elements. Components of a prime editing composition may be combined to form a complex for prime editing, or may be kept separately, e.g., for administration purposes.

[0565] In some embodiments, a prime editing composition comprises a first prime editing guide RNA (PEgRNA), a second PEgRNA, and a prime editor. In some embodiments, a prime editing composition comprises a first prime editing guide RNA (PEgRNA), a second PEgRNA, and a prime editor fusion protein complexed with the first PEgRNA and a prime editor fusion protein complexed with the second PEgRNA. In some embodiments, the prime editor fusion protein complexed with the first PEgRNA and the prime editor fusion protein complexed with the second PEgRNA are the identical prime editor fusion protein. In some embodiments, the prime editor fusion protein complexed with the first PEgRNA and the prime editor fusion protein complexed with the second PEgRNA are different prime editor fusion proteins.

[0566] In some embodiments, a prime editing composition comprises a first prime editing guide RNA (PEgRNA), a second PEgRNA, and a prime editor comprising a DNA binding domain and a DNA polymerase domain associated with each other through the first PEgRNA and/or the second PEgRNA. For example, the prime editing composition may comprise a prime editor comprising a DNA binding domain and a DNA polymerase domain linked to each other by an RNA-protein recruitment aptamer RNA sequence, which is linked to either or both of the first and second PEgRNAs. In some embodiments, the prime editing composition comprises a first PEgRNA, a second PEgRNA, and a prime editor comprising a DNA binding domain and a DNA polymerase domain, wherein the prime editor for both the first PEgRNA and the second PEgRNA are the same. In some embodiments, the prime editing composition comprises a first PEgRNA, a second PEgRNA, and a prime editor comprising a DNA binding domain and a DNA polymerase domain, wherein the prime editor for both the first PEgRNA and the second PEgRNA are different.

[0567] In some embodiments, a prime editing composition comprises a first PEgRNA, a second PEgRNA, and a polynucleotide, a polynucleotide construct, or a vector that encodes a prime editor fusion protein. In some embodiments, a prime editing composition comprises a first PEgRNA, a second PEgRNA, and one or more polynucleotides, one or more polynucleotide constructs, or one or more vectors that encode a prime editor comprising a DNA binding domain and a DNA polymerase domain. In some embodiments, a prime editing composition comprises a first PEgRNA, a second PEgRNA, and a polynucleotide, a polynucleotide construct, or a vector that encodes a prime editor fusion protein. In some embodiments, a prime editing composition comprises multiple polynucleotides, polynucleotide constructs, or vectors, each of which encodes one or more prime editing composition components. In some embodiments, the first PEgRNA and/or the second PEgRNA of a prime editing composition is associated with the DNA binding domain, e.g., a Cas9 nickase, of the prime editor. In some embodiments, the first PEgRNA and/or the second PEgRNA of a prime editing composition complexes with the DNA binding domain of a prime editor and directs the prime editor to the double-stranded target DNA.

[0568] In some embodiments, a prime editing composition comprises one or more polynucleotides that encode prime editor components and/or the first PEgRNA and/or the second PEgRNAs. In some embodiments, a prime editing composition comprises a polynucleotide encoding a fusion protein comprising a DNA binding domain and a DNA polymerase domain. In some embodiments, a prime editing composition comprises (i) a polynucleotide encoding a fusion protein comprising a DNA binding domain and a DNA polymerase domain, (ii) a first PEgRNA or a polynucleotide encoding the first PEgRNA, and (iii) a second PEgRNA or a polynucleotide encoding the second PEgRNA. In some embodiments, a prime editing composition consists of (i) a polynucleotide encoding a fusion protein comprising a DNA binding domain and a DNA polymerase domain, (ii) a first PEgRNA or a polynucleotide encoding the first PEgRNA, and (iii) a second PEgRNA or a polynucleotide encoding the second PEgRNA. In some embodiments, a prime editing composition comprises (i) a polynucleotide encoding a DNA binding domain of a prime editor, e.g., a Cas9 nickase, (ii) a polynucleotide encoding a DNA polymerase domain of a prime editor, e.g., a reverse transcriptase, (iii) a first PEgRNA or a polynucleotide encoding the first PEgRNA, and (iv) a second PEgRNA or a polynucleotide encoding the second PEgRNA. In some embodiments, a prime editing composition consists of (i) a polynucleotide encoding a DNA binding domain of a prime editor, e.g., a Cas9 nickase, (ii) a polynucleotide encoding a DNA polymerase domain of a prime editor, e.g., a reverse transcriptase, (iii) a first PEgRNA or a polynucleotide encoding the first PEgRNA, and (iv) a second PEgRNA or a polynucleotide encoding the second PEgRNA.

[0569] In some embodiments, the polynucleotide encoding the DNA binding domain or the polynucleotide encoding the DNA polymerase domain further encodes an additional polypeptide domain, e.g., an RNA-protein recruitment domain, such as a MS2 coat protein domain. In some embodiments, a prime editing composition comprises (i) a polynucleotide encoding a N-terminal half of a prime editor fusion protein and an intein-N and (ii) a polynucleotide encoding a C-terminal half of a prime editor fusion protein and an intein-C. In some embodiments, a prime editing composition comprises (i) a polynucleotide encoding a N-terminal half of a prime editor fusion protein and an intein-N (ii) a polynucleotide encoding a C-terminal half of a prime editor fusion protein and an intein-C, (iii) a first PEgRNA or a polynucleotide encoding the first PEgRNA, and (iv) a second PEgRNA or a polynucleotide encoding the second PEgRNA. In some embodiments, a prime editing composition comprises (i) a polynucleotide encoding a N-terminal portion of a DNA binding domain and an intein-N, (ii) a polynucleotide encoding a C-terminal portion of the DNA binding domain, an intein-C, and a DNA polymerase domain. In some embodiments, the DNA binding domain is a Cas protein domain, e.g., a Cas9 nickase. In some embodiments, the prime editing composition comprises (i) a polynucleotide encoding a N-terminal portion of a DNA binding domain and an intein-N, (ii) a polynucleotide encoding a C-terminal portion of the DNA binding domain, an intein-C, and a DNA polymerase domain, (iii) a first PEgRNA or a polynucleotide encoding the first PEgRNA, and (iv) a second PEgRNA or a polynucleotide encoding the second PEgRNA.

[0570] In some embodiments, a prime editing system comprises one or more polynucleotides encoding one or more prime editor polypeptides, wherein activity of the prime editing system may be temporally regulated by controlling the timing in which the vectors are delivered. For example, in some embodiments, a polynucleotide encoding the prime editor and a polynucleotide encoding a PEgRNA or both PEgRNAs may be delivered simultaneously. For example, in some embodiments, a polynucleotide encoding the prime editor and a polynucleotide encoding a PEgRNA or both PEgRNAs may be delivered sequentially.

[0571] In some embodiments, a polynucleotide encoding a component of a prime editing system may further comprise an element that is capable of modifying the intracellular half-life of the polynucleotide and/or modulating translational control. In some embodiments, the polynucleotide is a RNA, for example, an mRNA. In some embodiments, the half-life of the polynucleotide, e.g., the RNA may be increased. In some embodiments, the half-life of the polynucleotide, e.g., the RNA may be decreased. In some embodiments, the element may be capable of increasing the stability of the polynucleotide, e.g., the RNA. In some embodiments, the element may be capable of decreasing the stability of the polynucleotide, e.g., the RNA. In some embodiments, the element may be within the 3′ UTR of the RNA. In some embodiments, the element may include a polyadenylation signal (PA). In some embodiments, the element may include a cap, e.g., at the 5′ (upstream) mRNA or PEgRNA end. In some embodiments, the RNA may comprise no PA such that it is subject to quicker degradation in the cell after transcription.

[0572] In some embodiments, the element may include at least one AU-rich element (ARE). The AREs may be bound by ARE binding proteins (ARE-BPs) in a manner that is dependent upon tissue type, cell type, timing, cellular localization, and environment. In some embodiments the destabilizing element may promote RNA decay, affect RNA stability, or activate translation. In some embodiments, the ARE may comprise 50 to 150 nucleotides in length. In some embodiments, the ARE may comprise at least one copy of the sequence AUUUA. In some embodiments, at least one ARE may be added to the 3′ UTR of the RNA. In some embodiments, the element may be a Woodchuck Hepatitis Virus Posttranscriptional Regulatory Element (WPRE). In further embodiments, the element is a modified and/or truncated WPRE sequence that is capable of enhancing expression from the transcript. In some embodiments, the WPRE or equivalent may be added to the 3′ UTR of the RNA. In some embodiments, the element may be selected from other RNA sequence motifs that are enriched in either fast- or slow-decaying transcripts. In some embodiments, the polynucleotide, e.g., a vector, encoding the PE or the PEgRNA may be self-destroyed via cleavage of a target sequence present on the polynucleotide, e.g., a vector. The cleavage may prevent continued transcription of a PE or a PEgRNA.

[0573] Polynucleotides encoding prime editing composition components can be DNA, RNA, or any combination thereof. In some embodiments, a polynucleotide encoding a prime editing composition component is an expression construct. In some embodiments, a polynucleotide encoding a prime editing composition component is a vector. In some embodiments, the vector is a DNA vector. In some embodiments, the vector is a plasmid. In some embodiments, the vector is a virus vector, e.g., a retroviral vector, adenoviral vector, lentiviral vector, herpesvirus vector, or an adeno-associated virus vector (AAV).

[0574] In some embodiments, polynucleotides encoding polypeptide components of a prime editing composition are codon optimized by replacing at least one codon (e.g., about or more than about 1, 2, 3, 4, 5, 10, 15, 20, 25, 50, or more codons) of the native sequence with codons that are more frequently or most frequently used in the genes of that host cell while maintaining the native amino acid sequence. In some embodiments, a polynucleotide encoding a polypeptide component of a prime editing composition are operably linked to one or more expression regulatory elements, for example, a promoter, a 3′ UTR, a 5′ UTR, or any combination thereof. In some embodiments, a polynucleotide encoding a prime editing composition component is a messenger RNA (mRNA). In some embodiments, the mRNA comprises a Cap at the 5′ end and/or a poly A tail at the 3′ end.

### Pharmaceutical Compositions

[0575] Disclosed herein are pharmaceutical compositions comprising any of the prime editing composition components, for example, prime editors, fusion proteins, polynucleotides encoding prime editor polypeptides, PEgRNAs, and/or prime editing complexes described herein.

[0576] The term “pharmaceutical composition”, as used herein, refers to a composition formulated for pharmaceutical use. In some embodiments, the pharmaceutical composition further comprises a pharmaceutically acceptable carrier. In some embodiments, the pharmaceutical composition comprises additional agents, e.g., for specific delivery, increasing half-life, or other therapeutic compounds.

[0577] In some embodiments, a pharmaceutically-acceptable carrier comprises any vehicle, such as a liquid or solid filler, diluent, excipient, manufacturing aid (e.g., lubricant, talc magnesium, calcium or zinc stearate, or steric acid), or solvent encapsulating material, involved in carrying or transporting the compound from one site (e.g., the delivery site) of the body, to another site (e.g., organ, tissue or portion of the body). A pharmaceutically acceptable carrier is “acceptable” in the sense of being compatible with the other ingredients of the formulation and not injurious to the tissue of the subject (e.g., physiologically compatible, sterile, physiologic pH,)

[0578] Formulations of the pharmaceutical compositions described herein can be prepared by any method known or hereafter developed in the art of pharmacology. In general, such preparatory methods include the step of bringing the active ingredient(s) into association with an excipient and/or one or more other accessory ingredients, and then, if necessary and/or desirable, shaping and/or packaging the product into a desired single- or multi-dose unit. Pharmaceutical formulations can additionally comprise a pharmaceutically acceptable excipient, which, as used herein, includes any and all solvents, dispersion media, diluents, or other liquid vehicles, dispersion or suspension aids, surface active agents, isotonic agents, thickening or emulsifying agents, preservatives, solid binders, lubricants and the like, as suited to the particular dosage form desired.

### Methods of Editing

[0579] The methods and compositions disclosed herein can be used to edit a target gene of interest by dual prime editing.

[0580] In some embodiments, the dual prime editing method comprises contacting a target gene, e.g., a FXN gene, with a first PEgRNA, a second PEgRNA and a prime editor (PE) polypeptide described herein. In some embodiments, the target gene is double-stranded, and comprises two strands of DNA complementary to each other. In some embodiments, the contacting with the two PEgRNAs and the contacting with a prime editor are performed sequentially. In some embodiments, the contacting with a prime editor is performed after the contacting with the two PEgRNAs. In some embodiments, the contacting with the two PEgRNAs is performed after the contacting with a prime editor. In some embodiments, the contacting with the two PEgRNAs is performed simultaneously either prior to or after contacting with a prime editor. In some embodiments, the contacting with the two PEgRNAs is performed sequentially either prior to or after contacting with a prime editor. In some embodiments, the contacting with the two PEgRNAs, and the contacting with a prime editor are performed simultaneously. In some embodiments, the two PEgRNAs and the prime editor are associated in complexes prior to contacting a target gene.

[0581] In some embodiments, contacting the target gene with the prime editing composition results in binding of the first PEgRNA to a first strand of the target gene, e.g., a FXN gene. In some embodiments, contacting the target gene with the prime editing composition results in binding of the second PEgRNA to a second strand of the target gene, e.g., a FXN gene. In some embodiments, contacting the target gene with the prime editing composition results in binding of the first PEgRNA to a first strand of the target gene and binding of the second PEgRNA to a second strand of the target gene, e.g., a FXN gene. In some embodiments, contacting the target gene with the prime editing composition results in binding of the first PEgRNA to a first search target sequence on the first strand of the target gene upon contacting with the first PEgRNA. In some embodiments, contacting the target gene with the prime editing composition results in binding of the second PEgRNA to a second search target sequence on the second strand of the target gene upon contacting with the second PEgRNA. In some embodiments, contacting the target gene with the prime editing composition results in binding of the first PEgRNA to a first search target sequence on the first strand of the target gene upon contacting with the first PEgRNA and binding of the second PEgRNA to a second search target sequence on the second strand of the target gene upon contacting with the second PEgRNA. In some embodiments, contacting the target gene with the prime editing composition results in binding of a first spacer of the first PEgRNA to a first search target sequence on the first strand of the target gene upon said contacting of the first PEgRNA. In some embodiments, contacting the target gene with the prime editing composition results in binding of a second spacer of the second PEgRNA to a second search target sequence on the second strand of the target gene upon said contacting of the second PEgRNA. In some embodiments, contacting the target gene with the prime editing composition results in binding of a first spacer of the first PEgRNA to a first search target sequence on the first strand of the target gene upon said contacting of the first PEgRNA and binding of a second spacer of the second PEgRNA to a second search target sequence on the second strand of the target gene upon said contacting of the second PEgRNA.

[0582] In some embodiments, contacting the target gene with the prime editing composition results in binding of the prime editor to the target gene, e.g., the target FXN gene, upon the contacting of the PE composition with the target gene. In some embodiments, a DNA binding domain of a prime editor associates with either a first PEgRNA and/or a second PEgRNA. In some embodiments, a prime editor associated with a first PEgRNA binds the first strand of a target gene, e.g., a FAN gene, as directed by the first PEgRNA. In some embodiments, a prime editor associated with a second PEgRNA binds the second strand of a target gene, e.g., a FXN gene, as directed by the second PEgRNA. In some embodiments, a prime editor associated with a first PEgRNA binds the first strand of a target gene as directed by the first PEgRNA, and a prime editor associated with a second PEgRNA binds the second strand of the target gene as directed by the second PEgRNA.

[0583] In some embodiments, a first PEgRNA directs a prime editor to generate a nick on the second strand of a target gene. In some embodiments, a second PEgRNA directs a prime editor to generate a nick on the first strand of a target gene. In some embodiments, a first PEgRNA directs a prime editor to generate a first nick on the second strand of a target gene, and a second PEgRNA directs a prime editor to generate a second nick on the first strand of a target gene, thereby generating an inter-nick duplex (IND) between the position of the first nick and the position of the second nick on the target gene. In some embodiments, the DNA binding domain of the prime editor is a Cas domain. In some embodiments, the DNA binding domain of the prime editor is a Cas9. In some embodiments, the DNA binding domain of the prime editor is a Cas9 nickase.

[0584] In some embodiments, contacting the target gene with the prime editing composition results in hybridization of the PEgRNA (e.g., the first PEgRNA and/or the second PEgRNA) with the 3′ end of the nicked single-stranded DNA, thereby priming DNA polymerization by a DNA polymerase domain of the prime editor. In some embodiments, the free 3′ end of the single-stranded DNA generated at the nick site hybridizes to a primer binding site sequence (PBS) of the contacted PEgRNA, thereby priming DNA polymerization. In some embodiments, the DNA polymerization is reverse transcription catalyzed by a reverse transcriptase domain of the prime editor. In some embodiments, the method comprises contacting the target gene with a DNA polymerase, e.g., a reverse transcriptase, as a part of a prime editor fusion protein or prime editing complex (in cis), or as a separate protein (in trans).

[0585] In some embodiments, contacting the target gene with the prime editing composition generates an overlap duplex (OD) or replacement duplex (RD) that replaces the IND. In some embodiments, the OD or RD comprises one or more intended nucleotide edits compared to the endogenous sequence of the target gene, e.g., a FXN gene. In some embodiments, the intended nucleotide edits are incorporated in the target gene by replacement of the IND by the OD or RD. In some embodiments, the intended nucleotide edits are incorporated in the target gene by excision of the IND and DNA repair. In some embodiments, excision of the 5′ single-stranded DNA of the edit strand generated at the nick site is by a flap endonuclease. In some embodiments, the flap nuclease is FEN1. In some embodiments, the method further comprises contacting the target gene with a flap endonuclease. In some embodiments, the flap endonuclease is provided as a part of a prime editor fusion protein. In some embodiments, the flap endonuclease is provided in trans.

[0586] In some embodiments, the target gene, e.g., a FXN gene, is in a cell. Accordingly, also provided herein are methods of modifying a cell.

[0587] In some embodiments, the prime editing method comprises introducing a first PEgRNA, a second PEgRNA, and a prime editor into the cell that has the target gene. In some embodiments, the prime editing method comprises introducing into the cell that has the target gene with a prime editing composition comprising a first PEgRNA, a second PEgRNA, and a prime editor polypeptide. In some embodiments, the first PEgRNA, the second PEgRNA, and the prime editor polypeptides form complexes prior to the introduction into the cell. In some embodiments, the first PEgRNA, the second PEgRNA, and the prime editor polypeptides form complexes after the introduction into the cell. The prime editors, PEgRNAs and prime editing complexes may be introduced into the cell by any delivery approaches described herein or any delivery approach known in the art, including ribonucleoprotein (RNPs), lipid nanoparticles (LNPs), viral vectors, non-viral vectors, mRNA delivery, and physical techniques such as cell membrane disruption by a microfluidics device. The prime editors, PEgRNAs, and prime editing complexes may be introduced into the cell simultaneously or sequentially.

[0588] In some embodiments, the prime editing method comprises introducing into the cell a first PEgRNA and a second PEgRNA, or polynucleotides encoding the first PEgRNA and the second PEgRNA, and a prime editor polynucleotide encoding a prime editor polypeptide. In some embodiments, the method comprises introducing the first PEgRNA and the second PEgRNA or the polynucleotides encoding the first PEgRNA and the second PEgRNA, and the polynucleotide encoding the prime editor polypeptide into the cell simultaneously. In some embodiments, the method comprises introducing the first PEgRNA and the second PEgRNA or the polynucleotides encoding the first PEgRNA and the second PEgRNA, and the polynucleotide encoding the prime editor polypeptide into the cell sequentially. In some embodiments, the method comprises introducing the polynucleotide encoding the prime editor polypeptide into the cell before introduction of the first PEgRNA and the second PEgRNA or the polynucleotides encoding the first PEgRNA and the second PEgRNA. In some embodiments, the polynucleotide encoding the prime editor polypeptide is introduced into and expressed in the cell before introduction of the first PEgRNA and the second PEgRNA or the polynucleotides encoding the first PEgRNA and the second PEgRNA into the cell. In some embodiments, the polynucleotide encoding the prime editor polypeptide is introduced into the cell after the first PEgRNA and the second PEgRNA or the polynucleotides encoding the first PEgRNA and the second PEgRNA are introduced into the cell. The polynucleotide encoding the prime editor polypeptide, the first PEgRNA and the second PEgRNA or the polynucleotides encoding the first PEgRNA and the second PEgRNA, may be introduced into the cell by any delivery approaches described herein or any delivery approach known in the art, for example, by RNPs, LNPs, viral vectors, non-viral vectors, mRNA delivery, and physical delivery.

[0589] In some embodiments, the polynucleotide encoding the prime editor polypeptide and the polynucleotides encoding the first PEgRNA and the second PEgRNA integrate into the genome of the cell after being introduced into the cell. In some embodiments, the polynucleotide encoding the prime editor polypeptide and the polynucleotides encoding the first PEgRNA and the second PEgRNA are introduced into the cell for transient expression. Accordingly, also provided herein are methods for modifying cells by prime editing.

[0590] In some embodiments, the cell is a prokaryotic cell. In some embodiments, the cell is a eukaryotic cell. In some embodiments, the cell is an FRDA relevant cell. In some embodiments, the cell is a mammalian cell. In some embodiments, the cell is a non-human primate cell, bovine cell, porcine cell, rodent, or mouse cell. In some embodiments, the cell is a human cell. In some embodiments, the cell is a primary cell. In some embodiments, the cell is a human primary cell. In some embodiments, the cell is a progenitor cell. In some embodiments, the cell is a human progenitor cell. In some embodiments, the cell is a muscle cell. In some embodiments, the cell is a primary muscle cell. In some embodiments, the cell is a human muscle cell. In some embodiments, the cell is a primary human muscle cell. In some embodiments, the cell is a primary human muscle cell derived from an induced human pluripotent stem cell (iPSC). In some embodiments, the cell is a neuron. In some embodiments, the neuron is a sensory from the dorsal root ganglion. In some embodiments, the cell is a neuron from the basal ganglia. In some embodiments, the cell is a neuron from the basal ganglia of a subject. In some embodiments, the cell is a fibroblast. In some embodiments, the cell is a human fibroblast. In some embodiments, the cell is a myogenic cell. In some embodiments, the cell is a myoblast. In some embodiments, the cell is a human myogenic cell. In some embodiments, the cell is a human myoblast. In some embodiments, the cell is a cardiac muscle cell. In some embodiments, the cell is a smooth muscle cell. In some embodiments, the cell is a myosatellite cell (also referred to as a satellite cell). In some embodiments, the cell is a human myosatellite cell. In some embodiments, the cell is a differentiated muscle cell. In some embodiments, the cell is a skeletal muscle cell. In some embodiments, the skeletal muscle cell is differentiated from an iPSC, ESC or myosatellite cell.

[0591] In some embodiments, the target gene edited by prime editing is in a chromosome of the cell. In some embodiments, the intended nucleotide edits incorporate in the chromosome of the cell and are inheritable by progeny cells. In some embodiments, the intended nucleotide edits introduced to the cell by the prime editing compositions and methods are such that the cell and progeny of the cell also include the intended nucleotide edits. In some embodiments, the cell is autologous, allogeneic, or xenogeneic to a subject. In some embodiments, the cell is from or derived from a subject. In some embodiments, the cell is from or derived from a human subject. In some embodiments, the cell is introduced back into the subject, e.g., a human subject, after incorporation of the intended nucleotide edits by prime editing.

[0592] In some embodiments, the method provided herein comprises introducing the prime editor polypeptide or the polynucleotide encoding the prime editor polypeptide, and the PEgRNAs (e.g., the first PEgRNA and the second PEgRNA) or the polynucleotides encoding the PEgRNAs, into a plurality or a population of cells that comprise the target gene. In some embodiments, the population of cells is of the same cell type. In some embodiments, the population of cells is of the same tissue or organ. In some embodiments, the population of cells is heterogeneous. In some embodiments, the population of cells is homogeneous. In some embodiments, the population of cells is from a single tissue or organ, and the cells are heterogeneous. In some embodiments, the introduction into the population of cells is ex vivo. In some embodiments, the introduction into the population of cells is in vivo, e.g., into a human subject.

[0593] In some embodiments, the target gene is in a genome of each cell of the population. In some embodiments, introduction of the prime editor polypeptide or the polynucleotide encoding the prime editor polypeptide, and the PEgRNAs (e.g., the first PEgRNA and the second PEgRNA) or the polynucleotides encoding the PEgRNAs, results in incorporation of one or more intended nucleotide edits in the target gene in at least one of the cells in the population of cells. In some embodiments, introduction of the prime editor polypeptide or the polynucleotide encoding the prime editor polypeptide, and the PEgRNAs or the polynucleotides encoding the PEgRNAs, results in incorporation of the one or more intended nucleotide edits in the target gene in a plurality of the population of cells. In some embodiments, introduction of the prime editor polypeptide or the polynucleotide encoding the prime editor polypeptide, and the PEgRNAs or the polynucleotide encoding the PEgRNAs, results in incorporation of the one or more intended nucleotide edits in the target gene in each cell of the population of cells. In some embodiments, introduction of the prime editor polypeptide or the polynucleotide encoding the prime editor polypeptide, and the PEgRNAs or the polynucleotides encoding the PEgRNAs, results in incorporation of the one or more intended nucleotide edits in the target gene in sufficient number of cells such that the disease or disorder is treated, prevented or ameliorated.

[0594] In some embodiments, editing efficiency of the prime editing compositions and method described herein can be measured by calculating the percentage of edited target genes in a population of cells introduced with the prime editing composition. The percentage of edited target genes can be assessed in any method known in the art, for example, with a next generation sequencing platform (e.g. Miseq) and suitable primers, by the percentage of edited reads over total sequenced reads. In some embodiments, the editing efficiency is determined after 1 hour, 2 hours, 6 hours, 12 hours, 24 hours, 36 hours, 48 hours, 3 days, 4 days, 5 days, 7 days, 10 days, or 14 days of exposing a target gene (e.g., a FXN gene within the genome of a cell) to a prime editing composition. In some embodiments, the population of cells introduced with the prime editing composition is ex vivo. In some embodiments, the population of cells introduced with the prime editing composition is in vitro. In some embodiments, the population of cells introduced with the prime editing composition is in vivo.

[0595] In some embodiments, the prime editing methods disclosed herein have an editing efficiency of at least about 1%, at least about 5%, at least about 10%, at least about 20%, at least about 30%, at least about 40%, at least about 50%, at least about 60%, at least about 70%, at least about 80%, at least about 90%, at least about 95%, or at least about 99%. In some embodiments, the prime editing methods disclosed herein have an editing efficiency of at least 25%. In some embodiments, the prime editing methods disclosed herein have an editing efficiency of at least 30%. In some embodiments, the prime editing methods disclosed herein have an editing efficiency of at least 35%. In some embodiments, the prime editing methods disclosed herein have an editing efficiency of at least 45%. In some embodiments, the primer editing methods disclosed herein have an editing efficiency of at least 50%.

[0596] In some embodiments, the dual prime editing compositions and methods disclosed herein have an editing efficiency of at least about 1%, at least about 5%, at least about 7.5%, at least about 10%, at least about 15%, at least about 20%, at least about 30%, at least about 40%, at least about 50%, at least about 60%, at least about 70%, at least about 80%, at least about 90%, at least about 95%, or at least about 99% of editing a primary cell.

[0597] In some embodiments, the dual primer editing compositions and methods disclosed herein have an editing efficiency of at least about 5%, at least about 7.5%, at least about 10%, at least about 15%, at least about 20%, at least about 30%, at least about 40%, at least about 50%, at least about 60%, at least about 70%, at least about 80%, at least about 90%, at least about 95%, or at least about 99% of editing a muscle cell relative to a corresponding control muscle cell. In some embodiments, the muscle cell is a human muscle cell.

[0598] In some embodiments, the dual prime editing compositions and methods provided herein are capable of incorporating one or more intended nucleotide edits without generating a significant proportion of indels. The term “indel(s)”, as used herein, refers to the insertion or deletion of a nucleotide base within a polynucleotide, for example, a target gene. Such insertions or deletions can lead to frame shift mutations within a coding region of a gene. Indel frequency of editing can be calculated by methods known in the art. In some embodiments, indel frequency can be calculated based on sequence alignment such as the CRISPResso 2 algorithm as described in Clement et al., Nat. Biotechnol. 37(3): 224-226 (2019), which is incorporated herein in its entirety. In some embodiments, the methods disclosed herein can have an indel frequency of less than 20%, less than 10%, less than 9%, less than 8%, less than 7%, less than 6%, less than 5%, less than 4%, less than 3%, less than 2%, less than 1.5%, or less than 1%. In some embodiments, any number of indels is determined after at least 1 hour, at least 2 hours, at least 6 hours, at least 12 hours, at least 24 hours, at least 36 hours, at least 48 hours, at least 3 days, at least 4 days, at least 5 days, at least 7 days, at least 10 days, or at least 14 days of exposing a target gene (e.g., a FXN gene within the genome of a cell) to a prime editing composition.

[0599] In some embodiments, the prime editing compositions provided herein are capable of incorporating one or more intended nucleotide edits efficiently without generating a significant proportion of indels. In some embodiments, the prime editing methods disclosed herein have an editing efficiency of at least about 1% and an indel frequency of less than about 5%, less than about 2.5%, less than about 1%, less than about 0.5%, or less than about 0.1% in a target cell, e.g., a human primary cell or muscle cell.

[0600] In some embodiments, the prime editing methods disclosed herein have an editing efficiency of at least about 5% and an indel frequency of less about 5%, less than about 2.5%, less than about 1%, less than about 0.5%, or less than about 0.1% in a target cell, e.g., a human primary cell or muscle cell.

[0601] In some embodiments, the prime editing methods disclosed herein have an editing efficiency of at least about 7.5% and an indel frequency of less than about 5%, less than about 2.5%, less than about 1%, less than about 0.5%, or less than about 0.1% in a target cell, e.g., a human primary cell or muscle cell.

[0602] In some embodiments, the prime editing methods disclosed herein have an editing efficiency of at least about 10% and an indel frequency of less than about 5%, less than about 2.5%, less than about 1%, less than about 0.5%, or less than about 0.1% in a target cell, e.g., a human primary cell or muscle cell.

[0603] In some embodiments, the prime editing methods disclosed herein have an editing efficiency of at least about 15% and an indel frequency of less than about 5%, less than about 2.5%, less than about 1%, less than about 0.5%, or less than about 0.1% in a target cell, e.g., a human primary cell or muscle cell.

[0604] In some embodiments, the prime editing methods disclosed herein have an editing efficiency of at least about 20% and an indel frequency of less than about 5%, less than about 2.5%, less than about 1%, less than about 0.5%, or less than about 0.1% in a target cell, e.g., a human primary cell or muscle cell.

[0605] In some embodiments, the prime editing methods disclosed herein have an editing efficiency of at least about 30% and an indel frequency of less than about 5%, less than about 2.5%, less than about 1%, less than about 0.5%, or less than about 0.1% in a target cell, e.g., a human primary cell or muscle cell.

[0606] In some embodiments, the prime editing methods disclosed herein have an editing efficiency of at least about 40% and an indel frequency of less than about 5%, less than about 2.5%, less than about 1%, less than about 0.5%, or less than about 0.1% in a target cell, e.g., a human primary cell or muscle cell.

[0607] In some embodiments, the prime editing methods disclosed herein have an editing efficiency of at least about 50% and an indel frequency of less than about 5%, less than about 2.5%, less than about 1%, less than about 0.5%, or less than about 1% in a target cell, e.g., a human primary cell or muscle cell.

[0608] In some embodiments, the prime editing methods disclosed herein have an editing efficiency of at least about 60% and an indel frequency of less than about 5%, less than about 2.5%, less than about 1%, less than about 0.5%, or less than about 0.5% in a target cell, e.g., a human primary cell or muscle cell.

[0609] In some embodiments, the prime editing methods disclosed herein have an editing efficiency of at least about 70% and an indel frequency of less than about 5%, less than about 2.5%, less than about 1%, less than about 0.5%, or less than about 0.1% in a target cell, e.g., a human primary cell or muscle cell.

[0610] In some embodiments, the prime editing methods disclosed herein have an editing efficiency of at least about 80% and an indel frequency of less than about 5%, less than about 2.5%, less than about 1%, less than about 0.5%, or less than about 0.1% in a target cell, e.g., a human primary cell or muscle cell.

[0611] In some embodiments, the prime editing methods disclosed herein have an editing efficiency of at least about 90% and an indel frequency of less than about 5%, less than about 2.5%, less than about 1%, less than about 0.5%, or less than about 0.1% in a target cell, e.g., a human primary cell or muscle cell.

[0612] In some embodiments, the prime editing methods disclosed herein have an editing efficiency of at least about 95% and an indel frequency of less than about 5%, less than about 2.5%, less than about 1%, less than about 0.5%, or less than about 0.1% in a target cell, e.g., a human primary cell or muscle cell.

[0613] In some embodiments, the prime editing composition described herein results in less than 50%, less than 40%, less than 30%, less than 20%, less than 19%, less than 18%, less than 17%, less than 16%, less than 15%, less than 14%, less than 13%, less than 12%, less than 11%, less than 10%, less than 9%, less than 8%, less than 7%, less than 6%, less than 5%, less than 4%, less than 3%, less than 2%, less than 1%, less than 0.9%, less than 0.8%, less than 0.7%, less than 0.6%, less than 0.5%, less than 0.4%, less than 0.3%, less than 0.2%, less than 0.1%, less than 0.09%, less than 0.08%, less than 0.07%, less than 0.06%, less than 0.05%, less than 0.04%, less than 0.03%, less than 0.02%, or less than 0.01% off-target editing in a chromosome that includes the target gene. In some embodiments, off-target editing is determined after at least 1 hour, at least 2 hours, at least 6 hours, at least 12 hours, at least 24 hours, at least 36 hours, at least 48 hours, at least 3 days, at least 4 days, at least 5 days, at least 7 days, at least 10 days, or at least 14 days of exposing a target gene (e.g., a nucleic acid within the genome of a cell) to a prime editing composition.

[0614] In some embodiments, the prime editing compositions (e.g., the PEgRNAs and prime editors as described herein) and dual prime editing methods disclosed herein can be used to edit a target FXN gene. In some embodiments, the target FXN gene comprises a mutation compared to a wild-type FXN gene. In some embodiments, the mutation is associated with Friedreich's ataxia. In some embodiments, the target FXN gene comprises an IND sequence that contains the mutation associated with Friedreich's ataxia. In some embodiments, the PEgRNAs of the prime editing compositions direct replacement of an edited portion of a FXN gene into the FXN gene. In some embodiments, the mutation is associated with Friedreich ataxia. In some embodiments, the mutation is in intron 1 of the FAN gene. In some embodiments, the mutation is expansion of the number of GAA repeats in intron 1 of the FXN gene. In some embodiments, the mutation is an increased number of tri-nucleotide repeats in the array of tri-nucleotide repeats compared to a wild-type FXN gene. In some embodiments, the mutation is an array of tri-nucleotide repeats comprising the sequence (GAA)n or a complementary sequence thereof, wherein n is any integer greater than 34. In some embodiments, n is an integer between 34 and 65. In some embodiments, n is an integer between 44 and 65. In some embodiments, n is an integer between 44 and 66. In some embodiments, n is an integer greater than 50. In some embodiments, n is an integer greater than 66. In some embodiments, n is an integer greater than 100. In some embodiments, n is an integer greater than 200, 300, 400, 500, 600, 700, 800, 900, or 1000. In some embodiments, n is an integer greater than 1000. In some embodiments, the prime editing method comprises contacting a target FXN gene with a prime editing composition comprising a prime editor, a first PEgRNA and a second PEgRNA. In some embodiments, contacting the target FXN gene with the prime editing composition results in incorporation of one or more intended nucleotide edits in the target FXN gene. In some embodiments, the incorporation is in a region of the target FXN gene that corresponds to an IND in the FXN gene. In some embodiments, the one or more intended nucleotide edits comprises a nucleotide substitution, an insertion, a deletion, or any combination thereof, compared to the endogenous sequence of the target FXN gene. In some embodiments, incorporation of the one or more intended nucleotide edits results in replacement of the one or more mutations with the corresponding sequence in a wild-type FXN gene. In some embodiments, incorporation of the one or more intended nucleotide edits results in correction of a mutation in the target FXN gene. In some embodiments, the target FXN gene comprises an IND sequence that contains the mutation. In some embodiments, contacting the target FXN gene with the prime editing composition results in incorporation of one or more intended nucleotide edits in the target FXN gene, which corrects the mutation in the IND in the target FXN gene.

[0615] In some embodiments, a population of patients with mutations in the target FXN gene may be treated with a prime editing composition (e.g., the pair of PEgRNAs and a prime editor as described herein) disclosed herein. In some embodiments, a population of patients with different distinct mutations in the target FXN gene can be treated with a single prime editing composition comprising the same pair of PEgRNAs and a prime editor. In some embodiments, a single prime editing composition comprising the same pair of PEgRNAs and a prime editor can be used to correct one or more mutations in the target FXN gene in a populations of patients, wherein one or more patients in the population have different mutations from one another. For example, in some embodiments, a single prime editing composition comprising a single pair of PEgRNAs and a single prime editor can be used to correct tri-nucleotide expansions, e.g., GAA expansions, in a population of patients, wherein one or more patients in the population have a different number of tri-nucleotide expansion from one another. In some embodiments, the prime editing composition comprising the same pair of PEgRNAs and a prime editor can be used to correct two or more mutations in the target FXN gene in a populations of patients, wherein one or more patients in the population have different mutations from one another. In some embodiments, the prime editing composition comprising the same pair of PEgRNAs and a prime editor can be used to correct 2, 3, 4, 5, 6, 7, 8, 9, 10, 15, 20, 25 or more mutations in the target FXN gene in a populations of patients, wherein one or more patients in the population have different mutations from one another. In some embodiments, the prime editing composition comprising the same pair of PEgRNAs and a prime editor can be used to correct 30, 35, 40, 45, 50, 60 more mutations in the target FXN gene in a populations of patients, wherein one or more patients in the population have different mutations from one another. In some embodiments, the first PEgRNA in the pair of PEgRNAs comprises a first editing template comprising a wild-type sequence of the FXN gene. In some embodiments, the second PEgRNA in the pair of PEgRNAs comprises a second editing template comprising a wild-type sequence of the FXN gene.

[0616] In some embodiments, a patient with multiple mutations in the target FXN gene may be treated with a prime editing composition (e.g., the pair of PEgRNAs and a prime editor as described herein) disclosed herein. For example, in some embodiments, a subject may comprise two copies of the FXN gene, each comprising one or more different mutations. In some embodiments, a patient with one or more different mutations in the target FXN gene can be treated with a single prime editing composition comprising a pair of PEgRNAs and a prime editor.

[0617] In some embodiments, the dual prime editing composition can be used to correct all of the mutations in a portion of the FXN gene. In some embodiments, the dual prime editing composition can be used to correct all of the mutations in the entire FXN gene.

[0618] In some embodiments, incorporation of the one or more intended nucleotide edits results in correction of a mutation in intron 1 of the FXN gene. In some embodiments, the mutation is associated with Friedreich ataxia. In some embodiments, the mutation is an expansion of the number of GAA repeats in intron 1 of the FXN gene. In some embodiments, the mutation is an increased number of tri-nucleotide repeats in the array of tri-nucleotide repeats compared to a wild-type FXN gene. In some embodiments, the mutation is an array of tri-nucleotide repeats comprising the sequence (GAA)n or a complementary sequence thereof, wherein n is any integer greater than 34. In some embodiments, n is an integer between 34 and 65. In some embodiments, n is an integer between 44 and 65. In some embodiments, n is an integer between 44 and 66. In some embodiments, n is an integer greater than 50. In some embodiments, n is an integer greater than 66. In some embodiments, n is an integer greater than 100. In some embodiments, n is an integer greater than 200, 300, 400, 500, 600, 700, 800, 900, or 1000. In some embodiments, n is an integer greater than 1000. In some embodiments, incorporation of the one or more intended nucleotide edits results in deletion of the GAA repeats in intron 1 of the FXN gene entirely. In some embodiments, incorporation of the one or more intended nucleotide edits results in reduced number of GAA repeats intron 1 of the FXN gene. In some embodiments, incorporation of the one or more intended nucleotide edits results in the number of GAA repeats in intron 1 of the FAN gene to less than 65. In some embodiments, incorporation of the one or more intended nucleotide edits results in the number of GAA repeats in intron 1 of the FXN gene to less than 44. In some embodiments, incorporation of the one or more intended nucleotide edits results in the number of GAA repeats in intron 1 of the FXN gene to less than 34. In some embodiments, incorporation of the one or more intended nucleotide edits results in the number of GAA repeats in intron 1 of the FXN gene to less than 12. In some embodiments, incorporation of the one or more intended nucleotide edits results in the number of GAA repeats in intron 1 of the FXN gene to less than 30, 20, or 10. In some embodiments, incorporation of the one or more intended nucleotide edits results in the number of GAA repeats in intron 1 of the FXN gene to 5. In some embodiments, the incorporation of the one or more intended nucleotide edits results in correction of a FXN gene sequence and restores expression of wild-type FXN transcripts.

[0619] In some embodiments, the target FXN gene is in a target cell. Accordingly, in one aspect provided herein is a method of editing a target cell comprising a target FXN gene that encodes a polypeptide that comprises one or more mutations relative to a wild-type FXN gene. In some embodiments, the methods of the present disclosure comprise introducing a prime editing composition comprising a pair of PEgRNAs (i.e., first PEgRNA and a second PEgRNA), and a prime editor polypeptide into the target cell that has the target FXN gene to edit the target FXN gene, thereby generating an edited cell. In some embodiments, the target cell is a mammalian cell. In some embodiments, the target cell is a human cell. In some embodiments, the target cell is an FRDA relevant cell. In some embodiments, the target cell is a primary cell. In some embodiments, the target cell is a human primary cell. In some embodiments, the target cell is a progenitor cell. In some embodiments, the target cell is a human progenitor cell. In some embodiments, the target cell is a stem cell. In some embodiments, the target cell is a human stem cell. In some embodiments, the target cell is a muscle cell. In some embodiments, the target cell is a human muscle cell. In some embodiments, the target cell is a primary human muscle cell derived from an induced human pluripotent stem cell (iPSC). In some embodiments, the cell is a neuron. In some embodiments, the cell is a neuron from the basal ganglia. In some embodiments, the cell is a neuron from the basal ganglia of a subject. In some embodiments, the cell is a neuron in the basal ganglia of a subject. In some embodiments, the cell is a neuron from a dorsal root ganglia.

[0620] In some embodiments, components of a prime editing composition described herein are provided to a target cell in vitro. In some embodiments, components of a prime editing composition described herein are provided to a target cell ex vivo. In some embodiments, components of a prime editing composition described herein are provided to a target cell in vivo.

[0621] In some embodiments, incorporation of the one or more intended nucleotide edits in the target FXN gene that comprises one or more mutations restores wild-type expression and function of the frataxin protein encoded by the FXN gene. In some embodiments, the target FXN gene comprises an expansion of the number of GAA repeats as compared to the wild-type FXN gene prior to incorporation of the one or more intended nucleotide edits. In some embodiments, expression of a FXN transcript with reduced number of GAA repeats compared to a FXN transcript encoded by the endogenous FXN gene can be measured when expressed in a target cell. In some embodiments, a change in the level of FXN mRNA expression comprises a decrease in the amount of FXN transcripts having GAA repeat numbers associated with Friedreich's ataxia, for example, 34 or more GAA repeats, or 66 or more GAA repeats. In some embodiments, a change in the level of FXN mRNA expression can comprise a fold change of, for example, at least about 2-fold decrease, about 3-fold decrease, about 4-fold decrease, about 5-fold decrease, about 6-fold decrease, about 7-fold decrease, about 8-fold decrease, about 9-fold decrease, about 10-fold decrease, about 25-fold decrease, about 50-fold decrease, about 100-fold decrease, about 200-fold decrease, about 500-fold decrease, about 700-fold decrease, about 1000-fold decrease, about 5000-fold decrease, or about 10,000-fold decrease in the amount of FXN transcripts having GAA repeat numbers associated with Friedreich's ataxia, for example, 34 or more GAA repeats, or 66 or more GAA repeats.

[0622] In some embodiments, increase in expression and/or function of frataxin protein or proteins affected by the expansion of GAA repeats in the FXN gene can be measured by a functional assay.

[0623] Functional assays can include ex vivo and/or in vivo assays, e.g., cell-based oxidant sensitivity assay (e.g., thioredoxin reductase inhibitor assay such as diamide assay), cardiomyocyte activity assays, neuron proliferation assays, glial cell proliferation assays, myelination assays, electrophysiology assays, and behavioral endpoint assessments, and cognitive testing in animal models.

[0624] In some embodiments, incorporation of the one or more intended nucleotide edits in the target FXN gene that comprises one or more mutations, for example, expanded GAA repeats, restores wild-type expression and function of frataxin encoded by the FXN gene. In some embodiments, the target FXN gene comprises an expansion of GAA repeats in intron 1 as compared to a wild-type FXN gene prior to incorporation of the one or more intended nucleotide edits. In some embodiments, expression and/or function of FXN and the frataxin protein after incorporation of the one or more intended nucleotide edits may be measured when expressed in a target cell. In some embodiments, incorporation of the one or more intended nucleotide edits in the target FXN gene leads to a fold change in a level of FXN gene expression, frataxin expression, or a combination thereof. In some embodiments, a change in the level of frataxin expression can comprise a fold increase of, for example, 2-fold, 3-fold, 4-fold, 5-fold, 6-fold, 7-fold, 8-fold, 9-fold, 10-fold, 15-fold, 20-fold, 25-fold, 30-fold, 40-fold, 50-fold, 60-fold, 70-fold, 80-fold, 90-fold, 100-fold or greater as compared to expression in a suitable control cell not introduced with a prime editing composition described herein. In some embodiments, incorporation of the one or more intended nucleotide edits in the target FXN gene that comprises GAA expansion in intron 1 restores frataxin expression by at least 10%, 20%, 30%, 40%, 50%, 60%, 70%, 80%, 90%, 95%, or 99% or more as compared to wild-type expression of the frataxin protein in a suitable control cell that comprises a wild-type FXN gene.

[0625] In some embodiments, frataxin expression can be measured by a protein expression assay. In some embodiments, the frataxin protein expression can be measured using antibody testing. In some embodiments, an antibody can comprise anti-frataxin. In some embodiments, the frataxin protein expression can be measured using ELISA, mass spectrometry, Western blot, sodium dodecyl sulfate polyacrylamide gel electrophoresis (SDS-PAGE), high performance liquid chromatography (HPLC), electrophoresis, or any combination thereof. In some embodiments, a protein assay can comprise SDS-PAGE and densitometric analysis of a Coomassie Blue-stained gel.

### Methods of Treating Friedreich's Ataxia

[0626] In some embodiments, provided herein are methods for treatment of a subject diagnosed with a disease associated with or caused by one or more pathogenic mutations that can be corrected by prime editing. In some embodiments, provided herein are methods for treating Friedreich's ataxia that comprise administering to a subject a therapeutically effective amount of a prime editing composition, or a pharmaceutical composition comprising a prime editing composition as described herein.

[0627] Friedreich ataxia (FRDA) is a genetic neurodegenerative and cardiodegenerative disorder associated with primary degeneration of dorsal root ganglia, characterized by progressive sensory ataxia (with onset before 25 years of age), areflexia, dysarthria, lower-limb areflexia, decreased vibration sense, muscle weakness in the legs, and extensor plantar response. Diabetes, skeletal abnormalities, and hypertrophic cardiomyopathy are nonneurological symptoms, and heart failure is a frequent cause of death. Most patients carry two copies of the FXN gene, where each copy carries an intronic expansion of the number of GAA repeats compared to the normal FAN gene (although the number of GAA repeats in each of the two copies may be different from each other). This gene is composed of seven exons (1, 2, 3, 4, 5a, 5b, and 6) spanning about 80 kb of genomic DNA, and the GAA repeats are located in the middle of an Alu sequence in the first ˜11-kb long intron. FRDA patients have a marked deficiency of frataxin mRNA that eventually causes a significant reduction in the amount of frataxin protein, which is a highly conserved protein associated with the inner mitochondrial membrane and is involved in mitochondrial iron metabolism. Within cells, frataxin is found in mitochondria and although its function is not fully understood, frataxin appears to help assemble clusters of iron and sulfur molecules that are critical for the function of many proteins, including those needed for energy production.

[0628] The first intron of the FXN gene contains multiple copies of a guanine, adenine, adenine (GAA) trinucleotide repeat. Normal alleles have only a small number of GAA trinucleotide repeats (usually 5-33). In disease-causing alleles, the number of GAA repeats is expanded to 66-1700 or more repeats. In some individuals, the FXN gene has a GAA repeat number smaller than those in disease-causing alleles, (e.g., premutation alleles and borderline alleles) but are prone to genetic instability and hyperexpansion in one generation. An inverse correlation between the length of the GAA expansion and the age of onset and severity of the disease has been observed.

[0629] In some embodiments, administration of the prime editing composition results in incorporation of one or more intended nucleotide edits in the target gene of the subject. In some embodiments, administration of the prime editing composition results in correction of one or more pathogenic mutations, e.g., point mutations, insertions, or deletions, associated with Friedreich's ataxia in the subject. In some embodiments, the target gene comprises a sequence, e.g., the IND sequence that contains the pathogenic mutation. In some embodiments, administration of the prime editing composition results in incorporation of one or more intended nucleotide edits in the target gene that corrects the pathogenic mutation, or reduces the pathogenic effect of the mutation, by deleting the sequence of the IND and optionally replacing the IND sequence with one or more endogenous or exogenous sequence that has a reduced number of GAA repeats or does not comprise a GAA repeat in the target gene, thereby treating Friedreich's ataxia in the subject.

[0630] In some embodiments, the method provided herein comprises administering to a subject an effective amount of a prime editing composition, for example, a pair of PEgRNAs (i.e., a first PEgRNA and a second PEgRNA) and a prime editor. In some embodiments, the method comprises administering to the subject an effective amount of a prime editing composition described herein, for example, polynucleotides, vectors, or constructs that encode prime editing composition components, or RNPs, LNPs, and/or polypeptides comprising prime editing composition components. Prime editing compositions can be administered to target the FXN gene in a subject, e.g., a human subject, suffering from, having, susceptibility to, or at risk for Friedreich's ataxia. Identifying a subject in need of such treatment can be in the judgment of a subject or a health care professional and can be subjective (e.g., opinion) or objective (e.g., measurable by a test or diagnostic method). In some embodiments, the subject has Friedreich's ataxia.

[0631] In some embodiments, the subject has been diagnosed with Friedreich's ataxia by sequencing of a FXN gene in the subject. In some embodiments, the subject has been assessed with increased risk of developing Friedreich's ataxia, or increase genetic burden of FAN GAA hyperexpansion within a generation. In some embodiments, the subject comprises at least a copy of the FXN gene that comprises one or more mutations compared to a wild-type FXN gene. In some embodiments, the subject comprises at least a copy of the FXN gene that comprises a mutation in a non-coding region of the FXN gene. In some embodiments, the subject comprises at least a copy of the FXN gene that comprises a mutation in intron 1 of the FXN gene, as compared to a wild-type FXN gene. In some embodiments, the subject comprises two copies of the FXN gene, wherein each of the two copies comprises a mutation in intron 1 of the FXN gene as compared to a wild-type FXN gene. In some embodiments, the mutation is increased number of GAA repeats in intron 1 region as compared to a wild-type FXN gene. In some embodiments, the subject comprises at least a copy of the FXN gene that comprise 34-65 GAA repeats in intron 1. In some embodiments, the subject comprises two copies of the FXN gene that comprise 34-65 GAA repeats in intron 1. In some embodiments, the subject comprises at least a copy of the FXN gene that comprise 44-65 or 44-66 GAA repeats in intron 1. In some embodiments, the subject comprises two copies of the FXN gene that comprise 44-65 or 44-66 GAA repeats in intron 1. In some embodiments, the subject comprises at least a copy of the FXN gene that comprise more than 66 GAA repeats in intron 1. In some embodiments, the subject comprises two copies of the FXN gene that comprise more than 66 GAA repeats in intron 1. In some embodiments, the subject comprises at least one copy of the FXN gene that comprise 66-1300 GAA repeats in intron 1. In some embodiments, the subject comprises two copies of the FXN gene that comprise 66-1300 GAA repeats in intron 1.

[0632] In some embodiments, the method comprises directly administering prime editing compositions provided herein to a subject. The prime editing compositions described herein can be delivered in any form as described herein, e.g., as LNPs, RNPs, polynucleotide vectors such as viral vectors, or mRNAs. The prime editing compositions can be formulated with any pharmaceutically acceptable carrier described herein or known in the art for administering directly to a subject. Components of a prime editing composition or a pharmaceutical composition thereof may be administered to the subject simultaneously or sequentially. For example, in some embodiments, the method comprises administering a prime editing composition, or pharmaceutical composition thereof, comprising prime editor complexes that comprises (i) a prime editor fusion protein and a first PEgRNA and (ii) a prime editor fusion protein and a second PEgRNA to a subject. In some embodiments, the method comprises administering a polynucleotide or vector encoding a prime editor to a subject simultaneously with the two PEgRNAs. In some embodiments, the method comprises administering a polynucleotide or vector encoding a prime editor to a subject before administration of the two PEgRNAs. In some embodiments, the two PEgRNAs are administered simultaneously. In some embodiments, the two PEgRNAs are administered sequentially. In some embodiments, a first PEgRNA is administered with a prime editor and a second PEgRNA is administered after administration of the first PEgRNA and prime editor. In some embodiments, a first PEgRNA is administered with a prime editor and a second PEgRNA is administered before administration of the first PEgRNA and prime editor.

[0633] Suitable routes of administrating the prime editing compositions to a subject include, without limitation: topical, subcutaneous, transdermal, intradermal, intralesional, intraarticular, intraperitoneal, intravesical, transmucosal, gingival, intradental, intracochlear, transtympanic, intraorgan, epidural, intrathecal, intramuscular, intravenous, intravascular, intraosseus, periocular, intratumoral, intracerebral, and intracerebroventricular administration. In some embodiments, the compositions described are administered intraperitoneally, intravenously, or by direct injection or direct infusion. In some embodiments, the compositions described are administered by direct injection into the muscle of a subject. In some embodiments, the compositions described herein are administered to a subject by injection, by means of a catheter, by means of a suppository, or by means of an implant.

[0634] In some embodiments, the method comprises administering cells edited with a prime editing composition described herein to a subject. In some embodiments, the cells are allogeneic. In some embodiments, allogeneic cells are or have been contacted ex vivo with a prime editing composition or pharmaceutical composition thereof and are introduced into a human subject in need thereof. In some embodiments, the cells are autologous to the subject. In some embodiments, cells are removed from a subject and contacted ex vivo with a prime editing composition or pharmaceutical composition thereof and are re-introduced into the subject.

[0635] In some embodiments, cells are contacted ex vivo with one or more components of a prime editing composition. In some embodiments, the ex vivo-contacted cells are introduced into the subject, and the subject is administered in vivo with one or more components of a prime editing composition. For example, in some embodiments, cells are contacted ex vivo with a prime editor and introduced into a subject. In some embodiments, the subject is then administered with the PEgRNAs, or polynucleotides encoding the PEgRNAs.

[0636] In some embodiments, cells contacted with the prime editing composition are determined for incorporation of the one or more intended nucleotide edits in the genome before re-introduction into the subject. In some embodiments, the cells are enriched for incorporation of the one or more intended nucleotide edits in the genome before re-introduction into the subject. In some embodiments, the edited cells are primary cells. In some embodiments, the edited cells are progenitor cells. In some embodiments, the edited cells are stem cells. In some embodiments, the edited cells are muscle cells. In some embodiments, the edited cells are primary human cells. In some embodiments, the edited cells are human progenitor cells. In some embodiments, the edited cells are human stem cells. In some embodiments, the edited cells are human muscle cells. In some embodiments, the edited cells are human cardiac muscle cells, human smooth muscle cells, or human myosatellite cells). In some embodiments, the cell is a fibroblast. In some embodiments, the cell is a human fibroblast. In some embodiments, the edited cell is a myogenic cell. In some embodiments, the edited cell is a myoblast. In some embodiments, the edited cell is a human myogenic cell. In some embodiments, the edited cell is a human myoblast. In some embodiments, the cell is a neuron. In some embodiments, the cell is a neuron from the basal ganglia. In some embodiments, the cell is a neuron from the basal ganglia of a subject. In some embodiments, the cell is a neuron in the basal ganglia of a subject. In some embodiments, the edited cell is a neuron from the dorsal root ganglia. In some embodiments, the neuron is from the dorsal root ganglia of a subject with Friedreich's ataxia.

[0637] The prime editing composition or components thereof may be introduced into a cell by any delivery approach described herein, including LNP administration, RNP administration, electroporation, nucleofection, transfection, viral transduction, microinjection, cell membrane disruption and diffusion, or any other approach known in the art.

[0638] The cells edited with prime editing can be introduced into the subject by any route known in the art. In some embodiments, the edited cells are administered to a subject by direct infusion. In some embodiments, the edited cells are administered to a subject by intravenous infusion. In some embodiments, the edited cells are administered to a subject as implants.

[0639] The pharmaceutical compositions, prime editing compositions, and cells, as described herein, can be administered in effective amounts. In some embodiments, the effective amount depends upon the mode of administration. In some embodiments, the effective amount depends upon the stage of the condition, the age and physical condition of the subject, the nature of concurrent therapy, if any, and like factors well-known to the medical practitioner.

[0640] The specific dose administered can be a uniform dose for each subject. Alternatively, a subject's dose can be tailored to the approximate body weight of the subject. Other factors in determining the appropriate dosage can include the disease or condition to be treated or prevented, the severity of the disease, the route of administration, and the age, sex and medical condition of the patient.

[0641] In embodiments wherein components of a prime editing composition are administered sequentially, the time between sequential administration can be at least 1 hour, at least 2 hours, at least 6 hours, at least 12 hours, at least 24 hours, at least 36 hours, at least 48 hours, at least 3 days, at least 4 days, at least 5 days, at least 7 days, at least 10 days, or at least 14 days.

[0642] In some embodiments, a method of monitoring treatment progress is provided. In some embodiments, the method includes the step of determining a level of diagnostic marker, for example, correction of a mutation in the FXN gene, e.g., reduced number of GAA repeats in intron 1 of the FXN gene, or diagnostic measurement associated with Friedreich's ataxia, in a subject suffering from Friedreich's ataxia symptoms and has been administered an effective amount of a prime editing composition described herein. The level of the diagnostic marker determined in the method can be compared to known levels of the marker in either healthy normal controls or in other afflicted subjects to establish the subject's disease status.

[0643] Various aspects of this disclosure provide kits comprising a prime editing composition. In one embodiment, a kit comprises a prime editing composition comprising a pair of PEgRNAs (i.e., a first PEgRNA and a second PEgRNA) and a prime editor. In one embodiment, a kit comprises a prime editing composition comprising a pair of PEgRNAs (i.e., a first PEgRNA and a second PEgRNA) and a prime editor fusion protein. In some embodiments, the kit comprises a pair of PEgRNAs (i.e., a first PEgRNA and a second PEgRNA) and a polynucleotide encoding a prime editor. In some embodiments, the kit comprises a pair of PEgRNAs (i.e., a first PEgRNA and a second PEgRNA) and a polynucleotide encoding a prime editor fusion protein. In some embodiments, the kit further provides components for delivery of the PEgRNAs and/or the prime editor. In some embodiments, the kit further provides components for delivery of the PEgRNAs and/or the prime editor fusion protein. In some embodiments, the kit further provides components for delivery of the PEgRNAs and/or the polynucleotide encoding the prime editor. In some embodiments, the kit further provides components for delivery of the PEgRNAs and/or the polynucleotide encoding the prime editor fusion protein.

[0644] In some embodiments, the kit provides instructions for using the components of the kit for prime editing. The instructions will generally include information about the use of the kit for editing nucleic acid molecules. In other embodiments, the instructions include at least one of the following: precautions; warnings; clinical studies; and/or references. The instructions may be printed directly on the container (when present), or as a label applied to the container, or as a separate sheet, pamphlet, card, or folder supplied in or with the container. In a further embodiment, a kit can comprise instructions in the form of a label or separate insert (package insert) for suitable operational parameters. In yet another embodiment, the kit can comprise one or more containers with appropriate positive and negative controls or control samples, to be used as standard(s) for detection, calibration, or normalization. The kit can further comprise a second container comprising a pharmaceutically-acceptable buffer, such as (sterile) phosphate-buffered saline, Ringer's solution, or dextrose solution. The kit can further include other materials desirable from a commercial and user standpoint, including other buffers, diluents, filters, needles, syringes, and package inserts with instructions for use.

### Delivery

[0645] Prime editing compositions described herein can be delivered to a cellular environment with any approach known in the art. Components of a prime editing composition can be delivered to a cell by the same mode or different modes. For example, in some embodiments, a prime editor can be delivered as a polypeptide or a polynucleotide (DNA or RNA) encoding the polypeptide. In some embodiments, a PEgRNA can be delivered directly as an RNA or as a DNA encoding the PEgRNA.

[0646] In some embodiments, a prime editing composition component is encoded by a polynucleotide, a vector, or a construct. In some embodiments, a prime editor polypeptide and PEgRNAs is encoded by a polynucleotide. In some embodiments, the polynucleotide encodes a prime editor fusion protein comprising a DNA binding domain and a DNA polymerase domain. In some embodiments, the polynucleotide encodes a DNA polymerase domain of a prime editor. In some embodiments, the polynucleotide encodes a DNA binding domain of a prime editor. In some embodiments, the polynucleotide encodes a portion of a prime editor protein, for example, a N-terminal portion of a prime editor fusion protein connected to an intein-N. In some embodiments, the polynucleotide encodes a portion of a prime editor protein, for example, a C-terminal portion of a prime editor fusion protein connected to an intein-C. In some embodiments, the polynucleotide encodes a PEgRNA. In some embodiments, the polypeptide encodes two or more components of a prime editing composition, for example, a prime editor fusion protein and a PEgRNA.

[0647] In some embodiments, the polynucleotide encoding one or more prime editing composition components that is delivered to a target cell is integrated into the genome of the cell for long-term expression, for example, by a retroviral vector. In some embodiments, the polynucleotide delivered to a target cell is expressed transiently. For example, the polynucleotide may be delivered in the form of a mRNA, or a non-integrating vector (non-integrating virus, plasmids, minicircle DNAs) for episomal expression.

[0648] In some embodiments, a polynucleotide encoding one or more prime editing system components can be operably linked to a regulatory element, e.g., a transcriptional control element, such as a promoter. In some embodiments, the polynucleotide is operably linked to multiple control elements. Depending on the expression system utilized, any of a number of suitable transcription and translation control elements, including constitutive and inducible promoters, transcription enhancer elements, transcription terminators, etc. may be used in the expression vector (e.g., U6 promoter, H1 promoter).

[0649] In some embodiments, the polynucleotide encoding one or more prime editing composition components is a part of, or is encoded by, a vector. In some embodiments, the vector is a viral vector. In some embodiments, the vector is a non-viral vector.

[0650] Non-viral vector delivery systems can include DNA plasmids, RNA (e.g., a transcript of a vector described herein), naked nucleic acid, and nucleic acid complexed with a delivery vehicle, such as a liposome. In some embodiments, the polynucleotide is provided as an RNA, e.g., a mRNA or a transcript. Any RNA of the prime editing systems, for example a guide RNA or a base editor-encoding mRNA, can be delivered in the form of RNA. In some embodiments, one or more components of the prime editing system that are RNAs is produced by direct chemical synthesis or may be transcribed in vitro from a DNA. In some embodiments, a mRNA that encodes a prime editor polypeptide is generated using in vitro transcription. Guide polynucleotides (e.g., PEgRNA) can also be transcribed using in vitro transcription from a cassette containing a T7 promoter, followed by the sequence “GG”, and guide polynucleotide sequence. In some embodiments, the prime editor encoding mRNA and/or PEgRNA(s) are synthesized in vitro using an RNA polymerase enzyme (e.g., T7 polymerase, T3 polymerase, SP6 polymerase, etc.). Once synthesized, the RNA can directly contact a target FXN gene or can be introduced into a cell using any suitable technique for introducing nucleic acids into cells (e.g., microinjection, electroporation, transfection). In some embodiments, the prime editor-coding sequences and/or the PEgRNAs are modified to include one or more modified nucleoside e.g., using pseudo-U or 5-Methyl-C.

[0651] Methods of non-viral delivery of nucleic acids can include lipofection, nucleofection, microinjection, biolistics, virosomes, liposomes, immunoliposomes, polycation or lipid:nucleic acid conjugates, naked DNA, artificial virions, cell membrane disruption by a microfluidics device, and agent-enhanced uptake of DNA. Cationic and neutral lipids that are suitable for efficient receptor-recognition lipofection of polynucleotides can be used. Delivery can be to cells (e.g., in vitro or ex vivo administration) or target tissues (e.g., in vivo administration). The preparation of lipid:nucleic acid complexes, including targeted liposomes such as immunolipid complexes, can be used.

[0652] Viral vector delivery systems can include DNA and RNA viruses, which can have either episomal or integrated genomes after delivery to the cell. RNA or DNA viral based systems can be used to target specific cells and trafficking the viral payload to an organelle of the cell. Viral vectors can be administered directly (in vivo) or they can be used to treat cells in vitro, and the modified cells can optionally be administered (ex vivo).

[0653] In some embodiments, the viral vector is a retroviral, lentiviral, adenoviral, adeno-associated viral or herpes simplex viral vector. Retroviral vectors can include those based upon murine leukemia virus (MuLV), gibbon ape leukemia virus (GaLV), simian immunodeficiency virus (SIV), human immunodeficiency virus (HIV), and combinations thereof. In some embodiments, the retroviral vector is a lentiviral vector. In some embodiments, the retroviral vector is a gamma retroviral vector. In some embodiments, the viral vector is an adenoviral vector. In some embodiments, the viral vector is an adeno-associated virus (“AAV”) vector.

[0654] In some embodiments, polynucleotides encoding one or more prime editing composition components are packaged in a virus particle. Packaging cells can be used to form virus particles that can infect a target cell. Such cells can include 293 cells, (e.g., for packaging adenovirus), and .psi.2 cells or PA317 cells (e.g., for packaging retrovirus). Viral vectors can be generated by producing a cell line that packages a nucleic acid vector into a viral particle. The vectors can contain the minimal viral sequences required for packaging and subsequent integration into a host. The vectors can contain other viral sequences being replaced by an expression cassette for the polynucleotide(s) to be expressed. The missing viral functions can be supplied in trans by the packaging cell line. For example, AAV vectors can comprise ITR sequences from the AAV genome which are required for packaging and integration into the host genome.

[0655] In some embodiments, dual AAV vectors are generated by splitting a large transgene expression cassette in two separate halves (5′ and 3′ ends that encode N-terminal portion and C-terminal portion of, e.g., a prime editor polypeptide), where each half of the cassette is no more than 5 kb in length, optionally no more than 4.7 kb in length, and is packaged in a single AAV vector. In some embodiments, the full-length transgene expression cassette is reassembled upon co-infection of the same cell by both dual AAV vectors. In some embodiments, a portion or fragment of a prime editor polypeptide, e.g., a Cas9 nickase, is fused to an intein. The portion or fragment of the polypeptide can be fused to the N-terminus or the C-terminus of the intein. In some embodiments, a N-terminal portion of the polypeptide is fused to an intein-N, and a C-terminal portion of the polypeptide is separately fused to an intein-C. In some embodiments, a portion or fragment of a prime editor fusion protein is fused to an intein and fused to an AAV capsid protein. The intein, nuclease and capsid protein can be fused together in any arrangement (e.g., nuclease-intein-capsid, intein-nuclease-capsid, capsid-intein-nuclease). In some embodiments, a polynucleotide encoding a prime editor fusion protein is split in two separate halves, each encoding a portion of the prime editor fusion protein and separately fused to an intein. In some embodiments, each of the two halves of the polynucleotide is packaged in an individual AAV vector of a dual AAV vector system. In some embodiments, each of the two halves of the polynucleotide is no more than 5 kb in length, optionally no more than 4.7 kb in length. In some embodiments, the full-length prime editor fusion protein is reassembled upon co-infection of the same cell by both dual AAV vectors, expression of both halves of the prime editor fusion protein, and self-excision of the inteins.

[0656] A target cell can be transiently or non-transiently transfected with one or more vectors described herein. A cell can be transfected as it naturally occurs in a subject. A cell can be taken or derived from a subject and transfected. A cell can be derived from cells taken from a subject, such as a cell line. In some embodiments, a cell transfected with one or more vectors described herein can be used to establish a new cell line comprising one or more vector-derived sequences. In some embodiments, a cell transiently transfected with the compositions of the disclosure (such as by transient transfection of one or more vectors, or transfection with RNA), and modified through the activity of a prime editor, can be used to establish a new cell line comprising cells containing the modification but lacking any other exogenous sequence. Any suitable vector compatible with the host cell can be used with the methods of the disclosure. Non-limiting examples of vectors include pXT1, pSG5, pSVK3, pBPV, pMSG, and pSVLSV40.

[0657] In some embodiments, a prime editor protein can be provided to cells as a polypeptide. In some embodiments, the prime editor protein is fused to a polypeptide domain that increases solubility of the protein. In some embodiments, the prime editor protein is formulated to improve solubility of the protein.

[0658] In some embodiment, a prime editor polypeptide is fused to a polypeptide permeant domain to promote uptake by the cell. In some embodiments, the permeant domain is a peptide, a peptidomimetic, or a non-peptide carrier. For example, a permeant peptide may be derived from the third alpha helix of Drosophila melanogaster transcription factor Antennapaedia, referred to as penetratin, which comprises the amino acid sequence RQIKIWFQNRRMKWKK (SEQ ID NO: 2384). As another example, the permeant peptide can comprise the HIV-1 tat basic region amino acid sequence, which may include, for example, amino acids 49-59 of naturally-occurring tat protein YGRKKRRQRRR, SEQ ID NO: 2385. Other permeant domains can include poly-arginine motifs, for example, the region of amino acids 34-56 of HIV-1 rev protein, nona-arginine, and octa-arginine. The nona-arginine (R9) sequence can be used. The site at which the fusion can be made may be selected in order to optimize the biological activity, secretion or binding characteristics of the polypeptide.

[0659] In some embodiments, a prime editor polypeptide is produced in vitro or by host cells, and it may be further processed by unfolding, e.g., heat denaturation, DTT reduction, etc. and may be further refolded. In some embodiments, a prime editor polypeptide is prepared by in vitro synthesis. Various commercial synthetic apparatuses can be used. By using synthesizers, naturally occurring amino acids can be substituted with unnatural amino acids. In some embodiments, a prime editor polypeptide is isolated and purified in accordance with recombinant synthesis methods, for example, by expression in a host cell and the lysate purified using HPLC, exclusion chromatography, gel electrophoresis, affinity chromatography, or other purification technique.

[0660] In some embodiments, components of a prime editing composition form a complex prior to delivery to a target cell. For example, a prime editor fusion protein and a PEgRNA can form a complex prior to delivery to the target cell. In some embodiments, a prime editing polypeptide (e.g., a prime editor fusion protein) and a guide polynucleotide (e.g., a PEgRNA) form a ribonucleoprotein (RNP) for delivery to a target cell. In some embodiments, the RNP comprises a prime editor fusion protein in complex with a PEgRNA. RNPs may be delivered to cells using known methods, such as electroporation, nucleofection, or cationic lipid-mediated methods, or any other approaches known in the art. In some embodiments, delivery of a prime editing composition or complex to the target cell does not require the delivery of foreign DNA into the cell. In some embodiments, the RNP comprising the prime editing complex is degraded over time in the target cell.

[0661] In some embodiments, a prime editing composition, for example, prime editor polypeptide components and PEgRNA(s) are introduced to a target cell by nanoparticles. In some embodiments, the prime editor polypeptide components and the PEgRNA form a complex in the nanoparticle. Any suitable nanoparticle design can be used to deliver genome editing system components or nucleic acids encoding such components. In some embodiments, the nanoparticle is inorganic. In some embodiments, the nanoparticle is organic. In some embodiments, a prime editing composition is delivered to a target cell, e.g., a muscle cell, in an organic nanoparticle, e.g., a lipid nanoparticle (LNP) or polymer nanoparticle.

[0662] In some embodiments, LNPs are formulated from cationic, anionic, neutral lipids, or combinations thereof. In some embodiments, neutral lipids, such as the fusogenic phospholipid DOPE or the membrane component cholesterol, are included to enhance transfection activity and nanoparticle stability. In some embodiments, LNPs are formulated with hydrophobic lipids, hydrophilic lipids, or combinations thereof. Lipids may be formulated in a wide range of molar ratios to produce an LNP. Any lipid or combination of lipids that are known in the art can be used to produce an LNP. Exemplary lipids and polymers used to produce nanoparticle formulations are provided below in Tables 65 and 66, respectively.

TABLE 65
Exemplary lipids for nanoparticle formulation or gene transfer

| Lipid | Abbreviation | Feature |
|---|---|---|
| 1,2-Dioleoyl-sn-glycero-3-phosphatidylcholine | DOPC | Helper |
| 1,2-Dioleoyl-sn-glycero-3-phosphatidylethanolamine | DOPE | Helper |
| Cholesterol | | Helper |
| N41-(2,3-Dioleyloxy)prophyliN,N,N-trimethylammonium | DOTMA | Cationic |
| chloride | | |
| 1,2-Dioleoyloxy-3-trimethylammonium-propane | DOGS | Cationic |
| Dioctadecylamidoglycylspermine | | |
| N-(3-Aminopropy1)-N,N-dimethy1-2,3-bis(dodecyloxy)-1- | GAP-DLRIE | Cationic |
| propanaminium bromide | | |
| Cetyltrimethylammonium bromide | CTAB | Cationic |
| 6-Lauroxyhexyl omithinate | LHON | Cationic |
| 1-(2,3-Dioleoyloxypropy1)-2,4,6-trimethylpyridinium | 2Oc | Cationic |
| 2,3-Dioleyloxy-N-P(spenninecarboxamido-ethy1J-N,Ndimethyl- | DOSPA | Cationic |
| 1-propanatninium trifluoroacetate | | |
| 1,2-Dioley1-3-trimethylamtnonium-propane | DOPA | Cationic |
| N-(2-Hydroxyethyl)-N,N-dimethy1-2,3-bis(tetradecyloxy)-1- | MDRIE | Cationic |
| propanaminium bromide | | |
| Dimyristooxypropyl dimethyl hydroxyethyl ammonium bromide | DMRI | Cationic |
| 3β-[N-(N′,N′-Dimethylaminoethane)-carbamoyl]cholesterol | DC-Chol | Cationic |
| Bis-guanidium-tren-cholesterol | BGTC | Cationic |
| 1,3-Diodeoxy-2-(6-carboxy-spermy1)-propylamide | DOSPER | Cationic |
| Dimethyloctadecylammonium bromide | DDAB | Cationic |
| Dioctadecylamidoglicylspermidin | DSL | Cationic |
| rac-[(2,3-Dioctadecyloxypropyl)(2-hydroxyethyl)]- | CLIP-1 | Cationic |
| dimethylammonium chloride | | |
| rac-[2(2,3-Dihexadecyloxypropyloxymethyloxy) | CLIP-6 | Cationic |
| ethyl]trimethylammoniun bromide | | |
| Ethyldimyristoylphosphatidylcholine | EDMPC | Cationic |
| 1,2-Distearyloxy-N,N-dimethyl-3-aminopropane | DSDMA | Cationic |
| 1,2-Dimyristoyl-trimethylammonium propane | DMTAP | Cationic |
| O,O′-Dimyristyl-N-lysyl aspartate | DMKE | Cationic |
| 1,2-Distearoyl-sn-glycero-3-ethylpho sphocholine | DSEPC | Cationic |
| N-Palmitoyl D-erythro-sphingosyl carbamoyl-spenmine | CCS | Cationic |
| N-t-Butyl-N0-tetradecyl-3-tetradecylaminopropionamidine | diC14- | Cationic |
| | amidine | |
| Octadecenolyoxy[ethyl-2-heptadecenyl-3 hydroxyethyl] | DOTIM | Cationic |
| imidazolinium chloride | | |
| N1-Cholesteryloxycarbonyl-3,7-diazanonane-1,9-diamine | CDAN | Cationic |
| 2-(3-Bis(3-amino-propy1)-amino]propylamino)- | RPR209120 | Cationic |
| Nditetradecylcarbamoylme-ethyl-acetamide | | |
| 1,2-dilinoleyloxy-3-dimethylaminopropane | DLinDMA | Cationic |
| 2,2-dilinoley1-4-dimethylaminoethyl-[1,3]-dioxolane | DLin-KC2- | Cationic |
| | DMA | |
| dilinoleyl-methyl-4-dimethylaminobutyrate | DLin-MC3- | Cationic |
| | DMA | |

TABLE 66
Exemplary polymers for nanoparticle formulation or gene transfer

| Polymer | Abbreviation |
|---|---|
| Poly(ethylene)glycol | PEG |
| Polyethylenimine | PEI |
| Dithiobis (succinimidylpropionate) | DSP |
| Dimethyl-3,3′-dithiobispropionimidate | DTBP |
| Poly(ethylene imine)biscarbamate | PEIC |
| Poly(L-lysine) | PLL |
| Histidine modified PLL | |
| Poly(N-vinylpyrrolidone) | PVP |
| Poly(propylenimine) | PPI |
| Poly(amidoamine) | PAMAM |
| Poly(amidoethylenimine) | SS_PAEI |
| Triethylenetetramine | TETA |
| Poly(β-aminoester) | |
| Poly(4-hydroxy-L-proline ester) | PHP |
| Poly(allylamine) | |
| Poly(α-[4-aminobutyl]-L-glycolic acid) | PAGA |
| Poly(D,L-lactic-co-glycolic acid) | PLGA |
| Poly(N-ethyl-4-vinylpyridinium bromide) | |
| Poly(phosphazene)s | PPZ |
| Poly(phosphoester)s | PPE |
| Poly(phosphoramidate)s | PPA |
| Poly(N-2-hydroxypropylmethacrylamide) | pHPMA |
| Poly (2-(dimethylamino)ethyl methacrylate) | pDMAEMA |
| Poly(2-aminoethyl propylene phosphate) | PPE-EA |
| Chitosan | |
| Galactosylated chitosan | |
| N-dodacylated chitosam | |
| Histone | |
| Collagen | |
| Dextran-spermine | D-SPM |

[0663] Exemplary delivery methods for polynucleotides encoding prime editing composition components are shown in Table 67 below.

TABLE 67
Exemplary Delivery Methods

| | | Delivery | | | |
|---|---|---|---|---|---|
| | | into Non- | | | Type of |
| | | Dividing | Duration of | Genome | Molecule |
| Delivery | Vector/Mode | Cells | Expression | Integration | Delivered |
| Physical | (e.g., | YES | Transient | NO | Nucleic |
| | electroporation, | | | | Acids and |
| | particle gun, | | | | Proteins |
| | Calcium | | | | |
| | phosphate | | | | |
| | transfection) | | | | |
| Viral | Retrovirus | NO | Stable | YES | RNA |
| | Lentivirus | YES | Stable | YES/NO with | RNA |
| | | | | modification | |
| | Adenovirus | YES | Transient | NO | DNA |
| | Adeno-Associated | YES | Stable | NO | DNA |
| | Virus (AAV) | | | | |
| | Vaccinia Virus | YES | Very | NO | DNA |
| | | | Transient | | |
| | Herpes Simplex | YES | Stable | NO | DNA |
| | Virus | | | | |
| Non-Viral | Cationic | YES | Transient | Depends on | Nucleic |
| | | | | what is | acids and |
| | | | | delivered | Proteins |
| | Polymeric | YES | Transient | NO | Nucleic |
| | Nanoparticles | | | | Acids |
| Biological | Attenuated | YES | Transient | NO | Nucleic |
| | Bacteria | | | | Acids |
| Non-Viral | Engineered | YES | Transient | NO | Nucleic |
| Delivery | Bacteriophages | | | | Acids |
| Vehicles | Mammalian | YES | Transient | NO | Nucleic |
| | Virus-like | | | | Acids |
| | Particles | | | | |
| | Biological | YES | Transient | NO | Nucleic |
| | liposomes: | | | | Acids |
| | Erythrocyte | | | | |
| | Ghosts and | | | | |
| | Exosomes | | | | |

[0664] The prime editing compositions of the disclosure, whether introduced as polynucleotides or polypeptides, can be provided to the cells for about 30 minutes to about 24 hours, e.g., 1 hour, 1.5 hours, 2 hours, 2.5 hours, 3 hours, 3.5 hours 4 hours, 5 hours, 6 hours, 7 hours, 8 hours, 12 hours, 16 hours, 18 hours, 20 hours, or any other period from about 30 minutes to about 24 hours, which can be repeated with a frequency of about every day to about every 4 days, e.g., every 1.5 days, every 2 days, every 3 days, or any other frequency from about every day to about every four days. The compositions may be provided to the subject cells one or more times, e.g., one time, twice, three times, or more than three times, and the cells allowed to incubate with the agent(s) for some amount of time following each contacting event e.g., 16-24 hours. In cases in which two or more different prime editing system components, e.g., two different polynucleotide constructs are provided to the cell (e.g., different components of the same prime editing system, or two different guide nucleic acids that are complementary to different sequences within the same or different target genes), the compositions may be delivered simultaneously (e.g., as two polypeptides and/or nucleic acids). Alternatively, they may be provided sequentially, e.g., one composition being provided first, followed by a second composition.

[0665] The prime editing compositions and pharmaceutical compositions of the disclosure, whether introduced as polynucleotides or polypeptides, can be administered to subjects in need thereof for about 30 minutes to about 24 hours, e.g., 1 hour, 1.5 hours, 2 hours, 2.5 hours, 3 hours, 3.5 hours 4 hours, 5 hours, 6 hours, 7 hours, 8 hours, 12 hours, 16 hours, 18 hours, 20 hours, or any other period from about 30 minutes to about 24 hours, which can be repeated with a frequency of about every day to about every 4 days, e.g., every 1.5 days, every 2 days, every 3 days, or any other frequency from about every day to about every four days. The compositions may be provided to the subject one or more times, e.g., one time, twice, three times, or more than three times. In cases in which two or more different prime editing system components, e.g., two different polynucleotide constructs are administered to the subject (e.g., different components of the same prime editing system, or two different guide nucleic acids that are complementary to different sequences within the same or different target genes), the compositions may be administered simultaneously (e.g., as two polypeptides and/or nucleic acids). Alternatively, they may be provided sequentially, e.g., one composition being provided first, followed by a second composition.

### EMBODIMENT GROUP A

[0666] Embodiment 1: In certain embodiments, a prime editing composition comprises (A) a first prime editing guide RNA (PEgRNA) or one or more polynucleotides encoding the first PEgRNA and (B) a second PEgRNA or one or more polynucleotides encoding the second PEgRNA, wherein the first PEgRNA comprises: (i) a first spacer that is complementary to a first search target sequence on a first strand of a FXN gene, (ii) a first gRNA core capable of binding to a Cas9 protein; and (iii) a first extension arm comprising a first editing template and a first primer binding site (PBS), wherein the first spacer comprises at its 3′ end nucleotides 4-20 of a sequence selected from the group consisting of SEQ ID NOs: 1, 101, 234, 331, 362, 391, 422, and 452, and wherein the first PBS comprises at its 5′ end a sequence that is the reverse complement of nucleotides 13-17 of the selected sequence; wherein the second PEgRNA comprises: (i) a second spacer that is complementary to a second search target sequence on a second strand of the FXN gene complementary to the first strand, (ii) a second gRNA core capable of binding to a Cas9 protein; and (iii) a second extension arm comprising a second editing template and a second PBS, wherein the second spacer comprises at its 3′ end nucleotides 4-20 of a sequence selected from the group consisting of SEQ ID NOs: 482, 511, 542, 571, 600, 631, 740, 767, 796, 823, 852, 881, 910, 937, 966, 990, 1017, 1132, 1159, 1186, 1215, 1324, 1351, 1380, 1405, 1430, 1455, 1480, 1505, 1528, 1553, 1578, 1603, 1628, 1653, 1678, 1703, 1728, 1753, 1777, 1802, 1827, 1848, 1873, 1898, 1923, and 1947, and wherein the second PBS comprises at its 5′ end a sequence that is the reverse complement of nucleotides 13-17 of the selected sequence; and wherein (a) the first editing template comprises a region of complementarity to the second editing template; (b) the first editing template comprises nucleotides 8-17 of the selected sequence for the second spacer, and the second editing template comprises nucleotides 8-17 of the selected sequence for the first spacer; or (c) the first editing template comprises nucleotides 8-17 of the selected sequence for the second spacer, and a region of complementarity to the second editing template, and the second editing template comprises nucleotides 8-17 of the selected sequence for the first spacer, and a region of complementarity to the first editing template.

[0667] Embodiment 2: The prime editing composition of embodiment 1, wherein the selected sequence for the first spacer is SEQ ID NO: 1, 101, or 234.

[0668] Embodiment 3: The prime editing composition of embodiment 1 or 2, wherein the selected sequence for the second spacer is SEQ ID NO: 631, 1017, or 1215.

[0669] Embodiment 4: The prime editing composition of any one of embodiments 1-3, wherein the selected sequence for the first spacer is SEQ ID NO: 101.

[0670] Embodiment 5: The prime editing composition of any one of embodiments 1-4, wherein the selected sequence for the second spacer is SEQ ID NO: 1017.

[0671] Embodiment 6: The prime editing composition of any one of embodiments 1-5, wherein the first spacer and/or the second spacer is from 16 to 22 nucleotides in length.

[0672] Embodiment 7: The prime editing composition of any one of embodiments 1-6, wherein the first spacer and/or the second spacer is 20 nucleotides in length and comprises the selected sequence.

[0673] Embodiment 8: The prime editing composition of any one of embodiments 1-7, wherein the first gRNA core and the second gRNA core comprise the same sequence.

[0674] Embodiment 9: The prime editing composition of embodiment 8, wherein the first gRNA core and the second gRNA core each comprises SEQ ID NO: 2260.

[0675] Embodiment 10: The Prime editing composition of embodiment 8, wherein the first gRNA core and the second gRNA core each comprises SEQ ID NO: 2259.

[0676] Embodiment 11: The prime editing composition of any one of embodiments 1-10, wherein the first spacer, the first gRNA core, the first editing template, and the first PBS form a contiguous sequence in a single molecule.

[0677] Embodiment 12: The prime editing composition of embodiment 11, wherein the first PEgRNA comprises from 5′ to 3′ the first spacer, the first gRNA core, the first editing template, and the first PBS.

[0678] Embodiment 13: The prime editing composition of any one of embodiments 1-12, wherein the second spacer, the second gRNA core, the second editing template, and the second PBS form a contiguous sequence in a single molecule.

[0679] Embodiment 14: The prime editing composition of embodiment 13, wherein the second pegRNA comprises from 5′ to 3′ the second spacer, the second gRNA core, the second editing template, and the second PBS.

[0680] Embodiment 15: The prime editing composition of any one of embodiments 1-14, where in the first PBS is at least 8 nucleotides in length and comprises at its 5′ end a sequence that is the reverse complement of nucleotides 10-17 of the selected sequence for the first spacer.

[0681] Embodiment 16: The prime editing composition of embodiment 15, wherein the first PBS is 8-17 nucleotides in length and comprises at its 5′ end a sequence that is the reverse complement of nucleotides 10-17, 9-17, 8-17, 7-17, 6-17, 5-17, 4-17, 3-17, 2-17, or 1-17 of the selected sequence for the first spacer.

[0682] Embodiment 17: The prime editing composition of embodiment 16, wherein the first PBS is 8-16 nucleotides in length and comprises at its 5′ end a sequence that is the reverse complement of nucleotides 10-17, 9-17, 8-17, 7-17, 6-17, 5-17, 4-17, 3-17, or 2-17 of the selected sequence for the first spacer.

[0683] Embodiment 18: The prime editing composition of embodiment 16, wherein the first PBS is 10-12 nucleotides in length and comprise at its 5′ end a sequence that is the reverse complement of nucleotides 8-17, 7-17, or 6-17 of the selected sequence for the first spacer.

[0684] Embodiment 19: The prime editing composition of any one of embodiments 1-18, where in the second PBS is at least 8 nucleotides in length and comprises at its 5′ end a sequence that is the reverse complement of nucleotides 10-17 of the selected sequence for the second spacer.

[0685] Embodiment 20: The prime editing composition of embodiment 19, wherein the second PBS is 8-17 nucleotides in length and comprises at its 5′ end a sequence that is the reverse complement of nucleotides 10-17, 9-17, 8-17, 7-17, 6-17, 5-17, 4-17, 3-17, 2-17, or 1-17 of the selected sequence for the second spacer.

[0686] Embodiment 21: The prime editing composition of embodiment 20, wherein the second PBS is 8-16 nucleotides in length and comprises at its 5′ end a sequence that is the reverse complement of nucleotides 10-17, 9-17, 8-17, 7-17, 6-17, 5-17, 4-17, 3-17, or 2-17 of the selected sequence for the second spacer.

[0687] Embodiment 22: The prime editing composition of embodiment 21, wherein the second PBS is 10-12 nucleotides in length and comprise at its 5′ end a sequence that is the reverse complement of nucleotides 8-17, 7-17, or 6-17 of the selected sequence for the first spacer.

[0688] Embodiment 23: The prime editing composition of any one of embodiments 1-22, wherein: the first spacer comprises SEQ ID NO: 1, and the first PBS comprises SEQ ID NO: 12 or 14, the first spacer comprises SEQ ID NO: 101, and the first PBS comprises SEQ ID NO: 112 or 114, or the first spacer comprises SEQ ID NO: 234, and the first PBS comprises SEQ ID NO: 245 or 247, and the second spacer comprises SEQ ID NO: 631, and the second PBS comprises SEQ ID NO: 642 or 644; the second spacer comprises SEQ ID NO: 1017, and the second PBS comprises SEQ ID NO: 1028 or 1030; or the second spacer comprises SEQ ID NO: 1215, and the second PBS comprises SEQ ID NO: 1226 or 1228.

[0689] Embodiment 24: The prime editing composition of any one of embodiments 1-23, wherein the first editing template comprises a region of complementarity to the second editing template.

[0690] Embodiment 25: The prime editing composition of embodiment 24, wherein the region of complementarity is about 15 to about 38 nucleotides in length.

[0691] Embodiment 26: The prime editing composition of embodiment 24, wherein the region of complementarity is about 18 to about 38 nucleotides in length

[0692] Embodiment 27: The prime editing composition of embodiment 25 or 26, wherein the first and/or the second editing template is about 15 to about 93 nucleotides in length.

[0693] Embodiment 28: The prime editing composition of any one of embodiments 24-27, wherein the GC content of the region of complementarity is at least about 27%.

[0694] Embodiment 29: The prime editing composition of embodiment 28, wherein the GC content of the region of complementarity is about 30% to about 85%

[0695] Embodiment 30: The prime editing composition of embodiment 28, wherein the GC content of the region of complementarity is about 40% to about 70%.

[0696] Embodiment 31: The prime editing composition of embodiment 28, wherein the GC content of the region of complementarity is about 63% to about 70%.

[0697] Embodiment 32: The prime editing composition of any one of embodiments 24-31, wherein the first editing template comprises nucleotides 1 to x of SEQ ID NO: a, wherein x is an integer from 10 to i, wherein i is the length of SEQ ID NO: a; wherein the second editing template comprises nucleotides 1 to y of SEQ ID NO: b, wherein y is an integer from (i+10−x) to i; wherein a is an integer from 1972 to 1991 or from 2401 to 2414, and wherein b is an integer that equals (a+99).

[0698] Embodiment 33: The prime editing composition of any one of embodiments 24-31, wherein the second editing template comprises nucleotides 1 to x of SEQ ID NO: a, wherein x is an integer from 10 to i, wherein i is the length of SEQ ID NO: a; wherein the first editing template comprises nucleotides 1 to y of SEQ ID NO: b, wherein y is an integer from (i+10−x) to i; wherein a is an integer from 1972 to 1991 or from 2401 to 2414, and wherein b is an integer that equals (a+99).

[0699] Embodiment 34: The prime editing composition of embodiment 38 or 39, wherein x is an integer from 15 to i.

[0700] Embodiment 35: The prime editing composition of embodiment 38 or 39, wherein x is an integer from 17 to i.

[0701] Embodiment 36: The prime editing composition of embodiment 38 or 39, wherein x is an integer from 17 to i, from 19 to i, from 20 to i, from 27 to i, from 28 to i, or from 29 to i.

[0702] Embodiment 37: The prime editing composition of any one of embodiments 32-36, wherein x equals y equals i.

[0703] Embodiment 38: The prime editing composition of any one of embodiments 32-37, wherein a is 1972.

[0704] Embodiment 39: The prime editing composition of any one of embodiments 32-37, wherein a is 1979, 1982, 1985, 1986, or 1991.

[0705] Embodiment 40: The prime editing composition of embodiment 24, wherein the first PEgRNA comprises a sequence selected from the group consisting of SEQ ID NOs: 22-25, 66-100, 122-125, 202-233, 255-258, and 299-330, and wherein the second PEgRNA comprises a sequence selected from the group consisting of SEQ ID NOs: 652-655, 708-739, 1038-1041, 1094-1131, 1236-1239, and 1292-1323.

[0706] Embodiment 41: The prime editing composition of embodiment 24, wherein the first PEgRNA comprises a sequence selected from the group consisting of SEQ ID NOs: 122-125 and 218-233, and wherein the second PEgRNA comprises a sequence selected from the group consisting of SEQ ID NOs: 652-655 and 724-739.

[0707] Embodiment 42: The prime editing composition of embodiment 24, wherein the first PEgRNA comprises a sequence selected from the group consisting of SEQ ID NOs: SEQ ID NOs: 122-125 and 218-233, and wherein the second PEgRNA comprises a sequence selected from the group consisting of SEQ ID NOs: 1038-1041, 1098, and 1101.

[0708] Embodiment 43: The prime editing composition of embodiment 24, wherein the first PEgRNA comprises a sequence selected from the group consisting of SEQ ID NOs: SEQ ID NOs: 122-125 and 218-233, and wherein the second PEgRNA comprises a sequence selected from the group consisting of SEQ ID NOs: 1236-1239 and 1308-1321.

[0709] Embodiment 44: The prime editing composition of embodiment 24, wherein the first PEgRNA comprises a sequence selected from the group consisting of SEQ ID NOs: 22-25, and 98-100, and wherein the second PEgRNA comprises a sequence selected from the group consisting of SEQ ID NOs: 652-655 and 724-739.

[0710] Embodiment 45: The prime editing composition of embodiment 24, wherein the first PEgRNA comprises a sequence selected from the group consisting of SEQ ID NOs: 22-25, and 98-100, and wherein the second PEgRNA comprises a sequence selected from the group consisting of SEQ ID NOs: 1038-1041, 1098, and 1101.

[0711] Embodiment 46: The prime editing composition of embodiment 24, wherein the first PEgRNA comprises a sequence selected from the group consisting of SEQ ID NOs: 22-25, and 98-100, and wherein the second PEgRNA comprises a sequence selected from the group consisting of SEQ ID NOs: 1236-1239 and 1308-1321.

[0712] Embodiment 47: The prime editing composition of embodiment 24, wherein the first PEgRNA comprises a sequence selected from the group consisting of SEQ ID NOs: 255-258, and 315-330, and wherein the second PEgRNA comprises a sequence selected from the group consisting of SEQ ID NOs: 652-655 and 724-739.

[0713] Embodiment 48: The prime editing composition of embodiment 24, wherein the first PEgRNA comprises a sequence selected from the group consisting of SEQ ID NOs: 255-258, and 315-330, and wherein the second PEgRNA comprises a sequence selected from the group consisting of SEQ ID NOs: 1038-1041, 1098, and 1101.

[0714] Embodiment 49: The prime editing composition of embodiment 24, wherein the first PEgRNA comprises a sequence selected from the group consisting of SEQ ID NOs: 255-258, and 315-330, and wherein the second PEgRNA comprises a sequence selected from the group consisting of SEQ ID NOs: 1236-1239 and 1308-1321.

[0715] Embodiment 50: The prime editing composition of any one of embodiments 1-23, wherein the first editing template comprises at its 3′ end nucleotides 8-17 of the selected sequence for the second spacer, and wherein the second editing template comprises at its 3′ end nucleotides 8-17 of the selected sequence of the first spacer.

[0716] Embodiment 51: The prime editing composition of embodiment 50, wherein the first editing template comprises at its 3′ end nucleotides 1-17, 2-17, 3-17, 4-17, 5-17, 6-17, 7-17, or 8-17 of the selected sequence for the second spacer, and/or wherein the second editing template comprises at its 3′ end nucleotides 1-17, 2-17, 3-17, 4-17, 5-17, 6-17, 7-17, or 8-17 of the selected sequence for the first spacer.

[0717] Embodiment 52: The prime editing composition of embodiment 50, wherein the first editing template comprises at its 3′ end nucleotides 3-17 of the selected sequence for the second spacer, and wherein the second editing template comprises at its 3′ end nucleotides 3-17 of the selected sequence of the first spacer.

[0718] Embodiment 53: The prime editing composition of embodiment 52, wherein the first editing template comprises a region of complementarity to a sequence on the second strand of the FXN gene that is directly downstream of nucleotide 3 of the second search target sequence, wherein the region of complementarity is about 20 to 30 nucleotides in length.

[0719] Embodiment 54: The prime editing composition of embodiment 53, wherein the region of complementarity is about 20, about 25, or about 30 nucleotides in length.

[0720] Embodiment 55: The prime editing composition of any one of embodiments 52-54, wherein the second editing template comprises a region of complementarity to a sequence on the first strand of the FXN gene that is directly downstream to nucleotide 3 of the first search target sequence, wherein the region of complementarity is about 20 to 30 nucleotides in length.

[0721] Embodiment 56: The prime editing composition of embodiment 55, wherein the region of complementarity is about 20, about 25, or about 30 nucleotides in length.

[0722] Embodiment 57: The prime editing composition of any one of embodiments 50-56, wherein the first editing template comprises a sequence selected from the group consisting of SEQ ID NOs: 2170-2172, wherein the selected sequence for the second spacer is SEQ ID NO: 631, optionally wherein the second spacer comprises at its 3′ end SEQ ID NO: 631.

[0723] Embodiment 58: The prime editing composition of any one of embodiments 50-56, wherein the first editing template comprises a sequence selected from the group consisting of SEQ ID NOs: 2173-2175, wherein the selected sequence for the second spacer is SEQ ID NO: 1017, optionally wherein the second spacer comprises at its 3′ end SEQ ID NO: 1017.

[0724] Embodiment 59: The prime editing composition of any one of embodiments 50-56, wherein the first editing template comprises a sequence selected from the group consisting of SEQ ID NOs: 2176-2178, wherein the selected sequence for the second spacer is SEQ ID NO: 1215, optionally wherein the second spacer comprises at its 3′ end SEQ ID NO: 1215.

[0725] Embodiment 60: The prime editing composition of any one of embodiments 50-59, wherein the second editing template comprises a sequence selected from the group consisting of SEQ ID NOs: 2179-2181, wherein the first spacer comprises at its 3′ end nucleotides 5-20 of SEQ ID NO: 101, optionally wherein the first spacer comprises at its 3′ end SEQ ID NO: 101.

[0726] Embodiment 61: The prime editing composition of any one of embodiments 50-56, wherein the first PEgRNA comprises a sequence selected from the group consisting of SEQ ID NOs: 166-177, and wherein the second PEgRNA comprises a sequence selected from the group consisting of SEQ ID NOs: 696-707.

[0727] Embodiment 62: The prime editing composition of any one of embodiments 50-56, wherein the first PEgRNA comprises a sequence selected from the group consisting of SEQ ID NOs: 178-189, and wherein the second PEgRNA comprises a sequence selected from the group consisting of SEQ ID NOs: 1082-1093.

[0728] Embodiment 63: The prime editing composition of any one of embodiments 50-56, wherein the first PEgRNA comprises a sequence selected from the group consisting of SEQ ID NOs: 190-201, and wherein the second PEgRNA comprises a sequence selected from the group consisting of SEQ ID NOs: 1280-1291.

[0729] Embodiment 64: The prime editing composition of any one of embodiments 1-23, wherein the first editing template comprises from 5′ to 3′ (i) a region of complementarity to the second editing template and (ii) nucleotides 8-17 of the selected sequence for the second spacer; and wherein the second editing template comprises from 5′ to 3′ (i) a region of complementarity to the first editing template and (ii) nucleotides 8-17 of the selected sequence for the first spacer.

[0730] Embodiment 65: The prime editing composition of embodiment 64, wherein the first editing template comprises nucleotides 1-17, 2-17, 3-17, 4-17, 5-17, 6-17, 7-17, or 8-17 of the selected sequence for the second spacer, and/or wherein the second editing template comprises 1-17, 2-17, 3-17, 4-17, 5-17, 6-17, 7-17, or 8-17 of the selected sequence for the first spacer.

[0731] Embodiment 66: The prime editing composition of embodiment 64, wherein the first editing template comprises nucleotides 3-17 of the selected sequence for the second spacer, and wherein the second editing template comprises nucleotides 3-17 of the selected sequence of the first spacer.

[0732] Embodiment 67: The prime editing composition of embodiment 64, wherein the first editing template comprises a region of complementarity to a sequence on the second strand of the FXN gene that is directly downstream to nucleotide 3 of the second search target sequence, wherein the region of complementarity is about 20 to 30 nucleotides in length.

[0733] Embodiment 68: The prime editing composition of any one of embodiments 64-67, wherein the second editing template comprises a region of complementarity to a sequence on the first strand of the FXN gene that is directly downstream to nucleotide 3 of the first search target sequence, wherein the region of complementarity is about 20 to 30 nucleotides in length.

[0734] Embodiment 69: The prime editing composition of any one of embodiments 64-68, wherein the region of complementarity between the first editing template and the second editing template is about 15 to about 38 nucleotides in length.

[0735] Embodiment 70: The prime editing composition of any one of embodiments 64-68, wherein the region of complementarity between the first editing template and the second editing template is about 15 to about 93 nucleotides in length.

[0736] Embodiment 71: The prime editing composition of any one of embodiments 1-39, 50-61, and 64-70, wherein the first PEgRNA and/or the second PEgRNA further comprises a 3′ motif, optionally wherein the 3′ motif is connected to the 3′ end of the PEgRNA via a linker.

[0737] Embodiment 72: The prime editing composition of embodiment 71, wherein the 3′ motif comprises the sequence of SEQ ID NO: 2237.

[0738] Embodiment 73: The prime editing composition of any one of embodiments 1-72, wherein the first PEgRNA and/or the second PEgRNA further comprises 5′mN*mN*mN* and 3′ mN*mN*mN*N modifications, where m indicates that the nucleotide contains a 2′-O-Me modification and a * indicates the presence of a phosphorothioate bond.

[0739] Embodiment 74: The prime editing composition of any one of embodiments 1-73, further comprising a prime editor or one or more polynucleotides encoding the prime editor, wherein the prime editor comprises (i) a Cas9 nickase having a nuclease inactivating mutation in the HNH domain and (ii) a reverse transcriptase.

[0740] Embodiment 75: The prime editing composition of embodiment 74, wherein the Cas9 nickase comprises an amino acid sequence having at least 80%, 85%, 90%, 95%, 96%, 97%, 98%, 99%, or 100% identity to SEQ ID NO: 2288.

[0741] Embodiment 76: The prime editing composition of embodiment 74 or 75, wherein the reverse transcriptase comprises an amino acid sequence having at least 80%, 85%, 90%, 95%, 96%, 97%, 98%, 99%, or 100% identity to SEQ ID NO: 2283.

[0742] Embodiment 77: The prime editing composition of embodiment 75 or 76, wherein the sequence identities are determined by Needleman-Wunsch alignment of two protein sequences with Gap Costs set to Existence: 11 Extension: 1 where percent identity is calculated by dividing the number of identities by the length of the alignment.

[0743] Embodiment 78: The prime editing composition of any one of embodiments 75-77, wherein the prime editor is a fusion protein.

[0744] Embodiment 79: The prime editing composition of embodiment 78, wherein the fusion protein comprises SEQ ID NO: 2343 or 2344.

[0745] Embodiment 80: The prime editing composition of any one of embodiments 74-79, wherein the one or more polynucleotides comprise (a) a first sequence encoding an N-terminal portion of the Cas9 nickase and an intein-N and (b) a second sequence encoding an intein-C, a C-terminal portion of the Cas9 nickase, and the reverse transcriptase.

[0746] Embodiment 81: The prime editing composition of any one of embodiments 74-80, comprising one or more vectors that comprises the one or more polynucleotides encoding the first PEgRNA, the one or more polynucleotides encoding the second PEgRNA, and the one or more polynucleotides encoding the prime editor.

[0747] Embodiment 82: The prime editing composition of embodiment 81, wherein the one or more vectors are AAV vectors.

[0748] Embodiment 83: An LNP comprising the prime editing composition of any one of embodiments 1-80.

[0749] Embodiment 84: A pharmaceutical composition comprising the prime editing composition of any one of embodiments 1-82 or the LNP of embodiment 83 and a pharmaceutically acceptable excipient.

[0750] Embodiment 85: A method of editing a FXN gene, the method comprising contacting the FXN gene with (a) the prime editing composition of any one of embodiments 1-73 and a prime editor comprising a Cas9 nickase having a nuclease inactivation mutation in the HNH domain and a reverse transcriptase, (b) the prime editing composition of any one of embodiments 74-82, or (c) the LNP of embodiment 83.

[0751] Embodiment 86: The method of embodiment 85, wherein the FXN gene is in a cell.

[0752] Embodiment 87: The method of embodiment 86, wherein the cell is a mammalian cell.

[0753] Embodiment 88: The method of embodiment 86, wherein the cell is a human cell.

[0754] Embodiment 89: The method of any one of embodiments 86-88, wherein the cell is a fibroblast, a myoblast, a neural stem cell, a neural progenitor cell, a neuron, a dorsal root ganglion cell, a cardiac progenitor cell, a cardiomyocyte, a retinal progenitor cell, or a retinal ganglion neuron.

[0755] Embodiment 90: The method of any one of embodiments 86-89, wherein the cell is in a subject.

[0756] Embodiment 91: The method of embodiment 90, wherein the subject is a human.

[0757] Embodiment 92: The method of any one of embodiments 86-91, wherein the cell is from a subject having Friedreich's Ataxia.

[0758] Embodiment 93: A cell generated by the method of any one of embodiments 86-92.

[0759] Embodiment 94: A population of cells generated by the method of any one of embodiments 86-92.

[0760] Embodiment 95: In certain embodiments, a method of treating Friedreich's Ataxia in a subject in need thereof, includes administering to the subject the pharmaceutical composition of embodiment 84.

### EMBODIMENT GROUP B

[0761] Embodiment 1: In certain embodiments, a composition includes a first prime editing guide RNA (PEgRNA) and a second PEgRNA, wherein the first PEgRNA comprises a first spacer that is complementary to a first search target sequence on a first strand of a double-stranded FXN gene, a first gRNA core that associates with a first prime editor comprising a DNA binding domain and DNA polymerase domain, and a first editing template; and the second PEgRNA comprises a second spacer that is complementary to a second search target sequence on a second strand of the double-stranded FXN gene, a second gRNA core that associates with a second prime editor comprising a DNA binding domain and a DNA polymerase domain, and a second editing template, wherein the first strand and the second strand of the double-stranded FXN gene are complementary to each other, and wherein the first editing template and the second editing template each comprises a region of complementarity to each other.

[0762] Embodiment 2: In certain embodiments a composition comprising a first prime editing guide RNA (PEgRNA) and a second PEgRNA, wherein the first PEgRNA comprises a first spacer that is complementary to a first search target sequence on a first strand of a double-stranded FXN gene, a first gRNA core that associates with a first prime editor comprising a DNA binding domain and DNA polymerase domain, and a first editing template; and the second PEgRNA comprises a second spacer that is complementary to a second search target sequence on a second strand of the double-stranded FXN gene, a second gRNA core that associates with a second prime editor comprising a DNA binding domain and a DNA polymerase domain, and a second editing template, wherein the first strand and the second strand of the double-stranded FXN gene are complementary to each other, wherein the first editing template comprises a region of identity to a sequence on the first strand of the FXN gene, and wherein the second editing template comprises a region of identity to a sequence on the second strand of the double-stranded FXN gene.

[0763] Embodiment 3: In certain embodiments, the first PEgRNA directs the first prime editor to generate a first nick on the second strand of the FXN gene, wherein the second PEgRNA directs the second prime editor to generate a second nick on the first strand of the FXN gene, and wherein the FXN gene comprises an inter-nick duplex (IND) between the position of the first nick and the position of the second nick.

[0764] Embodiment 4: In certain embodiments, in the composition of embodiment 3, the IND comprises an array of tri-nucleotide repeats.

[0765] Embodiment 5: In certain embodiments, the double-stranded FXN gene comprises a mutation associated with Friedreich's ataxia.

[0766] Embodiment 6: In certain embodiments, the IND comprises the mutation associated with Friedreich ataxia.

[0767] Embodiment 7: In certain embodiments, the mutation is an increased number of tri-nucleotide repeats in the array of tri-nucleotide repeats compared to a wild type FXN gene.

[0768] Embodiment 8: In certain embodiments, the array of tri-nucleotide repeats comprises the sequence (GAA)n or a complementary sequence thereof, wherein n is any integer greater than 33, optionally wherein n is an integer between 34-65.

[0769] Embodiment 9: In certain embodiments, n is an integer greater than 43, optionally wherein n is an integer between 44-66.

[0770] Embodiment 10: In certain embodiments, n is an integer greater than 65.

[0771] Embodiment 11: In certain embodiments, the first editing template comprises an exogenous sequence compared to the FXN gene.

[0772] Embodiment 12: In certain embodiments, the second editing template comprises an exogenous sequence compared to the FXN gene.

[0773] Embodiment 13: In certain embodiments, the region of complementarity between the first editing template and the second editing template comprises an exogenous sequence compared to the FXN gene.

[0774] Embodiment 14: In certain embodiments, the exogenous sequence comprises a marker, an expression tag, a barcode, or a regulatory sequence.

[0775] Embodiment 15: In certain embodiments, the first editing template comprises a region of complementarity to the IND on the second strand of the FXN gene.

[0776] Embodiment 16: In certain embodiments, the second editing template comprises a region of complementarity to the IND on the first strand of the FXN gene.

[0777] Embodiment 17: In certain embodiments, the sequence of the region of complementarity between the first editing template and the second editing template is at least partially identical to a sequence in the IND.

[0778] Embodiment 18: In certain embodiments, the first editing template comprises the sequence (GAA)n or (UUC)n, wherein n is any integer between 0 and 33, optionally wherein n is an integer between 0 and 30.

[0779] Embodiment 19: In certain embodiments, n is any integer between 0 and 12.

[0780] Embodiment 20: In certain embodiments, n is any integer between 0 and 5.

[0781] Embodiment 21: In certain embodiments, the second editing template comprises the sequence (GAA)m or (TTC)m, wherein m is any integer between 0 and 33, optionally wherein m is an integer between 0 and 30.

[0782] Embodiment 22: In certain embodiments, m is any integer between 0 and 12.

[0783] Embodiment 23: In certain embodiments, m is any integer between 0 and 5.

[0784] Embodiment 24: In certain embodiments, the region of complementarity between the first editing template and the second editing template comprises the sequence (GAA)w, wherein w is any integer between 0 and 33, optionally wherein m is an integer between 0 and 30.

[0785] Embodiment 25: The composition of embodiment 24, wherein w is any integer between 5 and 30.

[0786] Embodiment 26: The composition of embodiment 24, wherein w is any integer between 10 and 25.

[0787] Embodiment 27: The composition of any one of embodiments 24-26, wherein (n+m−w) is an integer no greater than 33, optionally wherein (n+m−w) is an integer no greater than 30.

[0788] Embodiment 28: The composition of any one of embodiments 1 and 3-27, wherein the region of complementarity between the first editing template and the second editing template comprises a region of complementarity of 5-10, 10-15, 15-20, 20-25, 25-30, 30-35, 35-40, 40-45, 45-50, 50-60, 60-70, 70-80, 80-90, 90-100, 100-110, 110-120, 120-130, 130-140, 140-150, 150-160 or 5-300 base pairs in length.

[0789] Embodiment 29: The composition of embodiment 28, wherein the region of the first editing template that is complementary to the second editing template comprises (GAA)n or (UUC)n, wherein n is an integer between 0 and 33, between 1 and 30, between 1 and 25, between 1 and 20, between 1 and 15, between 1 and 10, between 1 and 5, or between 1 and 3.

[0790] Embodiment 30: The composition of embodiment 28, wherein the region of the second editing template that is complementary to the first editing template comprises (GAA)m or (UUC)m, wherein m is an integer between 0 and 33, between 1 and 30, between 1 and 25, between 1 and 20, between 1 and 15, between 1 and 10, between 1 and 5, or between 1 and 3.

[0791] Embodiment 31: The composition of any one of embodiments 4-30, wherein the IND further comprises a sequence upstream of the array of tri-nucleotide repeats.

[0792] Embodiment 32: The composition of embodiment 31, wherein the sequence upstream of the tri-nucleotide repeat sequence is at least 10 base pairs in length.

[0793] Embodiment 33: The composition of embodiment 31, wherein the sequence upstream of the tri-nucleotide repeat sequence is 5 to 25 base pairs in length.

[0794] Embodiment 34: The composition of embodiment 31, wherein the sequence upstream of the tri-nucleotide repeat sequence is 20 to 50 base pairs in length.

[0795] Embodiment 35: The composition of embodiment 31, wherein the sequence upstream of the tri-nucleotide repeat sequence is 50 to 100 base pairs in length.

[0796] Embodiment 36: The composition of embodiment 31, wherein the sequence upstream of the tri-nucleotide repeat sequence is 100, 200, 300, 400, or 500 base pairs in length.

[0797] Embodiment 37: The composition of any one of embodiments 4-36, wherein the IND further comprises a sequence downstream of the array of tri-nucleotide repeats.

[0798] Embodiment 38: The composition of embodiment 37, wherein the sequence downstream of the tri-nucleotide repeat sequence is at least 10 base pairs in length.

[0799] Embodiment 39: The composition of embodiment 37, wherein the sequence downstream of the tri-nucleotide repeat sequence is 5 to 25 base pairs in length.

[0800] Embodiment 40: The composition of embodiment 37, wherein the sequence downstream of the tri-nucleotide repeat sequence is 20 to 50 base pairs in length.

[0801] Embodiment 41: The composition of embodiment 37, wherein the sequence downstream of the tri-nucleotide repeat sequence is 50 to 100 base pairs in length.

[0802] Embodiment 42: The composition of embodiment 37, wherein the sequence downstream of the tri-nucleotide repeat sequence is 100, 200, 300, 400, or 500 base pairs in length.

[0803] Embodiment 43: The composition of any one of embodiments 31-42, wherein the first editing template further comprises a region of complementarity to the sequence of the IND on the second strand upstream of the array of tri-nucleotide repeats, and/or wherein the first editing template further comprises a region of complementarity to the sequence of the IND on the second strand downstream of the array of tri-nucleotide repeats.

[0804] Embodiment 44: The composition of embodiment 43, wherein the region of complementarity of the first editing template to the sequence of the IND upstream of the array of tri-nucleotide repeats and/or the the region of complementarity of the first editing template to the sequence of the IND downstream of the array of tri-nucleotide repeats is 5 to 25 nucleotides in length.

[0805] Embodiment 45: The composition of embodiment 43, wherein the region of complementarity of the first editing template to the sequence of the IND upstream of the array of tri-nucleotide repeats and/or the the region of complementarity of the first editing template to the sequence of the IND downstream of the array of tri-nucleotide repeats is 10 to 15 nucleotides in length.

[0806] Embodiment 46: The composition of embodiment 43, wherein the region of complementarity of the first editing template to the sequence of the IND upstream of the array of tri-nucleotide repeats and/or the the region of complementarity of the first editing template to the sequence of the IND downstream of the array of tri-nucleotide repeats is 20 to 50 nucleotides in length.

[0807] Embodiment 47: The composition of embodiment 43, wherein the region of complementarity of the first editing template to the sequence of the IND upstream of the array of tri-nucleotide repeats and/or the the region of complementarity of the first editing template to the sequence of the IND downstream of the array of tri-nucleotide repeats is 50 to 100 nucleotides in length. Embodiment 48: The composition of any one of embodiments 37-47, wherein the second editing template further comprises a region of complementarity to the sequence of the IND on the first strand upstream of the array of tri-nucleotide repeats, and/or wherein the second editing template further comprises a region of complementarity to the sequence of the IND on the first strand downstream of the array of tri-nucleotide repeats.

[0808] Embodiment 49: The composition of embodiment 48, wherein the region of complementarity of the second editing template to the sequence of the IND upstream of the array of tri-nucleotide repeats and/or the region of complementarity of the second editing template to the sequence of the IND downstream of the array of tri-nucleotide repeats is 5 to 25 nucleotides in length.

[0809] Embodiment 50: The composition of embodiment 48, wherein the region of complementarity of the second editing template to the sequence of the IND downstream of the array of tri-nucleotide repeats and/or the region of complementarity of the second editing template to the sequence of the IND downstream of the array of tri-nucleotide repeats is 10 to 15 nucleotides in length.

[0810] Embodiment 51: The composition of embodiment 48, wherein the region of complementarity of the second editing template to the sequence of the IND downstream of the array of tri-nucleotide repeats and/or the region of complementarity of the second editing template to the sequence of the IND downstream of the array of tri-nucleotide repeats is 20 to 50 nucleotides in length.

[0811] Embodiment 52: The composition of embodiment 49, wherein the region of complementarity of the second editing template to the sequence of the IND downstream of the array of tri-nucleotide repeats and/or the region of complementarity of the second editing template to the sequence of the IND downstream of the array of tri-nucleotide repeats is 50 to 100 nucleotides in length.

[0812] Embodiment 53: The composition of embodiment 2-10, wherein the first editing template and the second editing template are not complementary to each other.

[0813] Embodiment 54: The composition of embodiment 2-10 or 53, wherein the first editing template and the second editing template comprise a region of complementarity to each other.

[0814] Embodiment 55: The composition of embodiment 58, wherein the region of complementarity between the first editing template and the second editing template comprises an exogenous sequence compared to the double-stranded FXN gene. Embodiment 56: The composition of embodiment 55, wherein the exogenous sequence comprises a marker, an expression tag, a barcode, or a regulatory sequence.

[0815] Embodiment 57: The composition of any one of embodiments 53-56, wherein the first editing template comprises a region of identity or substantial identity to a sequence on the first strand of the double-stranded FXN gene immediately adjacent to and outside the IND.

[0816] Embodiment 58: The composition of embodiment 57, wherein the region of identity or substantial identity of the first editing template to the sequence on the first strand of the double-stranded FXN gene immediately adjacent to and outside the IND is at least 10 nucleotides in length.

[0817] Embodiment 59: The composition of embodiment 57, wherein the region of identity or substantial identity of the first editing template to the sequence on the first strand of the double-stranded FXN gene immediately adjacent to and outside the IND is 15 to 100 nucleotides in length.

[0818] Embodiment 60: The composition of any one of embodiments 53-59, wherein the second editing template comprises a region of identity or substantial identity to a sequence on the second strand of the FXN gene immediately adjacent to and outside the IND.

[0819] Embodiment 61: The composition of embodiment 60, wherein the region of identity or substantial identity of the second editing template to the sequence on the second strand of the double-stranded FXN gene immediately adjacent to and outside the IND is at least 10 nucleotides in length.

[0820] Embodiment 62: The composition of embodiment 60, wherein the region of identity or substantial identity of the second editing template to the sequence on the second strand of the double-stranded FXN gene immediately adjacent to and outside the IND is 15 to 100 nucleotides in length.

[0821] Embodiment 63: The composition of any one of the preceding embodiments, wherein the first PEgRNA comprises a first primer binding site (PBS) sequence that comprises a region of complementarity to the second strand of the double-stranded FXN gene.

[0822] Embodiment 64: The composition of embodiment 63, wherein the second PEgRNA comprises a second PBS sequence that comprises a region of complementarity to the first strand of the double-stranded FXN gene.

[0823] Embodiment 65: The composition of embodiment 63 or 64, wherein the first PEgRNA comprises a structure: 5′-[first spacer]-[first gRNA core]-[first editing template]-[first primer binding site sequence]-3′.

[0824] Embodiment 66: The composition of embodiment 63 or 64, wherein the first PEgRNA comprises a structure: 5′-[first editing template]-[first primer binding site sequence]-[first spacer]-[first gRNA core]-3′.

[0825] Embodiment 67: The composition of any one of embodiments 63-66, wherein the second PEgRNA comprises a structure: 5′-[second spacer sequence]-[second gRNA core]-[second editing template]-[second primer binding site sequence]-3′.

[0826] Embodiment 68: The composition of any one of embodiments 63-66, wherein the second PEgRNA comprises a structure: 5′-[second editing template]-[second primer binding site sequence]-[second spacer]-[second gRNA core]-3′.

[0827] Embodiment 69: The composition of any one of embodiments 63-68, wherein the first PBS is at least partially complementary to the first spacer sequence.

[0828] Embodiment 70: The composition of any one of embodiments 64-69, wherein the second PBS is at least partially complementary to the second spacer sequence.

[0829] Embodiment 71: The composition of any one of embodiments 3-70, wherein the first search target sequence is at least 10, 50, 100, 200, 300, 400 or 500 nucleotides upstream of the IND.

[0830] Embodiment 72: The composition of embodiment 71, wherein the first search target sequence is at least 100 nucleotides upstream of the IND.

[0831] Embodiment 73: The composition of embodiment 71, wherein the first search target sequence is at least 50 nucleotides upstream of the IND.

[0832] Embodiment 74: The composition of any one of embodiments 3-73, wherein the second search target sequence is at least 10, 50, 100, 200, 300, 400 or 500 nucleotides downstream of the IND.

[0833] Embodiment 75: The composition of embodiment 74, wherein the second search target sequence is at least 100 nucleotides downstream of the IND.

[0834] Embodiment 76: The composition of embodiment 74, wherein the second search target sequence is at least 50 nucleotides downstream of the IND.

[0835] Embodiment 77: The composition of any one of embodiments 63-76, wherein the first PBS is about 2 to 20 nucleotides in length.

[0836] Embodiment 78: The composition of any one of embodiments 64-77, wherein the second PBS is about 2 to 20 nucleotides in length.

[0837] Embodiment 79: The composition of embodiment 78, wherein the first PBS is about 8 to 16 nucleotides in length.

[0838] Embodiment 80: The composition of embodiment 78, wherein the second PBS is about 8 to 16 nucleotides in length.

[0839] Embodiment 81: The composition of embodiment 78, wherein the first editing template is about 15-150 nucleotides in length.

[0840] Embodiment 82: The composition of embodiment 78, wherein the first editing template is about 15-100 nucleotides in length.

[0841] Embodiment 83: The composition of embodiment 78, wherein the first editing template is about 30-100 nucleotides in length.

[0842] Embodiment 84: The composition of embodiment 78, wherein the first editing template is about 50-100 nucleotides in length.

[0843] Embodiment 85: The composition of embodiment 78, wherein the first editing template is about 15-50 nucleotides in length.

[0844] Embodiment 86: The composition of embodiment 78, wherein the second editing template is about 15-150 nucleotides in length.

[0845] Embodiment 87: The composition of embodiment 78, wherein the second editing template is about 15-100 nucleotides in length.

[0846] Embodiment 88: The composition of embodiment 78, wherein the second editing template is about 30-100 nucleotides in length.

[0847] Embodiment 89: The composition of embodiment 78, wherein the second editing template is about 50-100 nucleotides in length.

[0848] Embodiment 90: The composition of embodiment 78, wherein the second editing template is about 15-50 nucleotides in length.

[0849] Embodiment 91: The composition of any one of the preceding embodiments, wherein the first editing template and second editing template are of the same length.

[0850] Embodiment 92: The composition of any one of embodiments 1-90, wherein the first editing template and second editing template are of different lengths.

[0851] Embodiment 93: The composition of any one of the preceding embodiments, wherein the first and/or the second spacer is about 15 to 25 nucleotides in length.

[0852] Embodiment 94: The composition of embodiment 93, wherein the first and/or the second spacer is about 17 to 22 nucleotides in length.

[0853] Embodiment 95: The composition of embodiment 93, wherein the first and/or the second spacer is about 20 to 22 nucleotides in length.

[0854] Embodiment 96: A dual prime editing system comprising the composition of any one of the preceding embodiments and further comprising a first prime editor that comprises a DNA binding domain and a DNA polymerase domain and associates with the first PEgRNA, and a second prime editor that comprises a DNA binding domain and a DNA polymerase domain and associates with the second PEgRNA.

[0855] Embodiment 97: The dual prime editing system of embodiment 96, wherein the first prime editor and the second prime editor are the same.

[0856] Embodiment 98: The dual prime editing system of embodiment 97, wherein the DNA binding domain is a CRISPR associated (Cas) protein domain.

[0857] Embodiment 99: The dual prime editing system of embodiment 98, wherein the Cas protein domain has a nickase activity.

[0858] Embodiment 100: The dual prime editing system of embodiment 98, wherein the Cas protein domain is a Cas9.

[0859] Embodiment 101: The dual prime editing system of embodiment 100, wherein the Cas9 comprises a mutation in an HNH domain.

[0860] Embodiment 102: The dual prime editing system of embodiment 100, wherein the Cas9 comprises a H840A mutation in the HNH domain.

[0861] Embodiment 103: The dual prime editing system of embodiment 98, wherein the Cas protein domain is a Cas12b.

[0862] Embodiment 104: The dual prime editing system of embodiment 98, wherein the Cas protein domain is a Cas12a, Cas12b, Cas12c, Cas12d, Cas12e, Cas14a, Cas14b, Cas14c, Cas14d, Cas14e, Cas14f, Cas14g, Cas14h, Cas14u, or a Casp.

[0863] Embodiment 105: The dual prime editing system of any one of embodiments 108-116, wherein the DNA polymerase domain is a reverse transcriptase.

[0864] Embodiment 106: The dual prime editing system of embodiment 105, wherein the reverse transcriptase is a retrovirus reverse transcriptase.

[0865] Embodiment 107: The dual prime editing system of embodiment 106, wherein the reverse transcriptase is a Moloney murine leukemia virus (M-MLV) reverse transcriptase.

[0866] Embodiment 108: The dual prime editing system of any one of embodiments 96-107, wherein the DNA polymerase domain and the DNA binding domain are fused or linked to form a fusion protein, and wherein the DNA binding domain is a programmable DNA binding domain.

[0867] Embodiment 109: A lipid nanoparticle (LNP) or ribonucleoprotein (RNP) comprising the dual prime editing system of any one of embodiments 108-120, or a component thereof.

[0868] Embodiment 110: A polynucleotide encoding the first PEgRNA and second PEgRNA of any one of embodiments, the dual prime editing system of any one of embodiments, or a component thereof.

[0869] Embodiment 111: The polynucleotide of embodiment 110, wherein the polynucleotide is a mRNA.

[0870] Embodiment 112: The polynucleotide of embodiment 1110 or 111, wherein the polynucleotide is operably linked to a regulatory element.

[0871] Embodiment 113: The polynucleotide of embodiment 112, wherein the regulatory element is an inducible regulatory element.

[0872] Embodiment 114: A vector comprising the polynucleotide of any one of embodiments 111-113.

[0873] Embodiment 115: The vector of embodiment 114, wherein the vector is an AAV vector.

[0874] Embodiment 116: An isolated cell comprising the first PEgRNA and second PEgRNA of any one of embodiments, the dual prime editing system of any one of embodiments, the LNP or RNP of embodiment 109, the polynucleotide of any one of embodiments 110-113, or the vector of embodiments 114-115.

[0875] Embodiment 117: The cell of embodiment 116, wherein the cell is a human cell.

[0876] Embodiment 118: The cell of embodiment 116 or 117, wherein the cell is an FRDA relevant cell, a stem cell; pluripotent cell; embryonic stem cell; induced pluripotent stem cell (iPSC); multi-lineage stem cell; neural stem cell; radial glial cell/glial progenitor cell (GPS), including astrocyte-biased glial progenitor cell, oligodendrocyte-biased glial progenitor cell, and unbiased glial progenitor cell; glial cell; neuron, including spinal motor neuron, medium spiny neuron, cortical neuron, and striatal neuron; astrocyte; oligodendrocyte; neural cell; muscle cell; primary muscle cell; differentiated muscle cell; cardiac muscle cell; smooth muscle cell; skeletal muscle cell; myosatellite cell; myogenic cell; myoblast; muscle progenitor cell; or fibroblast.

[0877] Embodiment 119: A pharmaceutical composition comprising (i) the composition of any one of embodiments, the dual prime editing system of any one of embodiments, the LNP or RNP of embodiment 109, the polynucleotide of any one of embodiments 110-113, or the vector of embodiments 114-115, or the cell of any one of embodiments 128-130; and (ii) a pharmaceutically acceptable carrier.

[0878] Embodiment 120: A method for editing a FXN gene, the method comprising contacting the FXN gene with (i) the composition of any one of embodiments 1-107, (ii) a first prime editor comprising a DNA binding domain and a DNA polymerase domain that associates with the first PEgRNA, and (iii) a second prime editor comprising a DNA binding domain and a DNA polymerase domain that associates with the second PEgRNA, wherein the first PEgRNA directs the first prime editor to generate a first nick on the second strand of the FXN gene, wherein the second PEgRNA directs the second prime editor to generate a second nick on the first strand of the FXN gene, and wherein the contacting results in excision of an inter-nick duplex (IND) between the position of the first nick and the position of the second nick of the FXN gene, thereby editing the FXN gene.

[0879] Embodiment 121: A method for editing a FXN gene, the method comprising contacting the FXN gene with the dual prime editing system of any one of embodiments 108-120, wherein the first PEgRNA directs the first prime editor to generate a first nick on the second strand of the FXN gene, wherein the second PEgRNA directs the second prime editor to generate a second nick on the first strand of the FXN gene, and wherein the contacting results in excision of an inter-nick duplex (IND) between the position of the first nick and the position of the second nick of the FXN gene, thereby editing the FXN gene.

[0880] Embodiment 122: The method of embodiment 120 or 121, wherein the first prime editor and the second prime editor are the same.

[0881] Embodiment 123: The method of any one of embodiments 120-122, wherein the first editing template encodes a first single stranded DNA, and wherein the first single stranded DNA is incorporated in the FXN gene.

[0882] Embodiment 124: The method of any one of embodiments 120-123, wherein the second editing template encodes a second single stranded DNA, and wherein the second single stranded DNA is incorporated in the FXN gene.

[0883] Embodiment 125: The method of any one of embodiments 120-124, wherein the contacting results in deletion of the array of tri-nucleotide repeats in the FXN gene.

[0884] Embodiment 126: The method of any one of embodiments 120-124, wherein the contacting results in a reduced number of tri-nucleotide repeats in the FXN gene.

[0885] Embodiment 127: The method of any one of embodiments 120-126, wherein the contacting results in replacement or deletion of the sequence (GAA)x in the FXN gene, wherein x is an integer no less than 1.

[0886] Embodiment 128: The method of embodiment 127, wherein x is an integer between 5 and 30.

[0887] Embodiment 129: The method of embodiment 127, wherein x is an integer greater than 30, optionally wherein x is an integer between 34 and 65, optionally wherein x is an integer between 44 and 66, optionally wherein x is greater than 50 or greater than 66.

[0888] Embodiment 130: The method of embodiment 127, wherein x is an integer greater than 100.

[0889] Embodiment 131: The method of embodiment 127, wherein x is an integer greater than 1000.

[0890] Embodiment 132: The method of any one of embodiments 120-131, wherein the contacting results in no greater than 33 GAA repeats in intron 1 of the FXN gene.

[0891] Embodiment 133: The method of embodiment 132, wherein the contacting results in no GAA repeats in intron 1 of the FXN gene.

[0892] Embodiment 134: The method of any one of embodiments 120-133, wherein the FXN gene is in a cell.

[0893] Embodiment 135: The method of embodiment 134, wherein the cell is a mammalian cell, human cell, primary cell, neural cell, or muscle cell.

[0894] Embodiment 136: The method of embodiment 134 or 135, wherein the cell is an FRDA relevant cell, stem cell; pluripotent cell; embryonic stem cell; induced pluripotent stem cell (iPSC); multi-lineage stem cell; neural stem cell; radial glial cell/glial progenitor cell (GPS), including astrocyte-biased glial progenitor cell, oligodendrocyte-biased glial progenitor cell, and unbiased glial progenitor cell; glial cell; neuron, including spinal motor neuron, medium spiny neuron, cortical neuron, and striatal neuron; astrocyte; oligodendrocyte; neural cell; muscle cell; primary muscle cell; differentiated muscle cell; cardiac muscle cell; smooth muscle cell; skeletal muscle cell; myosatellite cell; myogenic cell; myoblast; muscle progenitor cell; or fibroblast.

[0895] Embodiment 137: The method of any one of embodiments 134-136, wherein the cell is in a subject.

[0896] Embodiment 138: The method of embodiment 137, wherein the subject is a human.

[0897] Embodiment 139: The method of any one of embodiments 134-138, wherein the cell is from a subject having Friedrich ataxia.

[0898] Embodiment 140: The method of embodiment 139, further comprising administering the cell to the subject after the contacting.

[0899] Embodiment 141: A method for treating Friedrich ataxia in a subject in need thereof, the method comprising administering to the subject the composition of any one of embodiments 1-107, the dual prime editing system of any one of embodiments 108-120, the LNP or RNP of embodiment 121, the polynucleotide of any one of embodiments 122-125, the vector of embodiments 126 or 127, the cell of any one of embodiments 128-130, or the pharmaceutical composition of embodiment 131, wherein the administration results in a reduced number of an array of GAA repeats in the FXN gene in the subject, thereby treating Friedrich ataxia in the subject.

[0900] Embodiment 142: The method of embodiment 141, wherein the subject is a human.

[0901] Embodiment 143: The method of embodiment 121, wherein the editing comprises editing an FXN gene that has full penetrance repeats, borderline repeats, or permutation repeats. Embodiment 144: The method of embodiment 121 wherein the editing reduces a repeat number to long normal repeats, short normal repeats, 5 repeats or 0 repeats.

### EXAMPLES

[0902] The following examples are provided for illustrative purposes only and are not intended to limit the scope of the claims provided herein.

### Example 1—General Methods

[0903] PEgRNA assembly: PEgRNA libraries are assembled by one of three methods: (1) pooled synthesized DNA oligos encoding the PEgRNA and flanking U6 expression plasmid homology regions are cloned into U6 expression plasmids via Gibson cloning and sequencing of bacterial colonies via Sanger or Next-generation sequencing; (2) double-stranded linear DNA fragments encoding PEgRNA and homology sequences as above are individually Gibson-cloned into U6 expression plasmids; (3) for each PEgRNA, separate oligos encoding a protospacer, a gRNA scaffold, and PEgRNA extension (PBS and RTT) are ligated, and then cloned into a U6 expression plasmid as described in Anzalone et al., Nature. 2019 December; 576(7785):149-157. Bacterial colonies carrying sequence-verified plasmids are propagated in TB. Plasmid DNA is purified by minipreps for mammalian transfection.

[0904] HEK cell culture and transfection: HEK293T cells are propagated in DMEM with 10% FBS. Prior to transfection, cells are seeded in 96-well plates and then transfected with Lipofectamine 2000 according to the manufacturer's directions with plasmids encoding a prime editor fusion protein and a pair of PEgRNAs. 72 hours after transfection, genomic DNA is harvested in lysis buffer for sequencing and analysis.

[0905] iPSC lipofection: iPSCs are seeded in cell culture plates (for 24-well plates, at a density of 40-50 k/well; for 96-well plates, at a density of 10-15 k/well) a day before lipofection. On lipofection day, polynucleotides encoding the prime editor fusion protein and the PEgRNA pair are mixed in Opti-MEM with RNase inhibitor, and then mixed with Opti-MEM containing Lipofectamine STEM. After 10 minutes of incubation at room temperature, the mixture was added into the medium of the well containing iPSCs. Plates were gently swirled to ensure even distribution of the liposome complex across the entire well. Plates were returned to incubator and cultured at 37° C. with 5% CO2. Fresh culture medium was changed every day. 3 days after lipofection, cells were lysed and gDNA was extracted using Lucigen QuickExtract to evaluate gene editing efficiency.

[0906] Sequence analysis: For high throughput sequencing and analysis with Miseq, editing efficiency was calculated using the following formula: editing efficiency=(numerator/denominator) %, wherein the numerator is calculated by the number of reads of exact match of the expected edited FXN gene (for example, for a PEgRNA pair designed to excise GAA repeats and insert an attB sequence, correct editing would yield a unique sequence composed of, from 5′ to 3′, the 5′ protospacer start-to-nick, attB sequence, and nick-to-end of the 3′ spacer on the sense strand), and the denominator is calculated by the number of reads of the first 50 base pairs of the amplicon of all reads mapping to the amplicon. Indel frequency was calculated using the formula: indel frequency=(numerator/denominator) %, wherein the denominator is the same as in editing efficiency calculation, and the numerator is the number of reads of the RTT insert (the attB insert) subtracted by the number of reads of exact match of the expected edited FXN sequence as designed by the editing templates.

[0907] For droplet digital PCR (ddPCR), FAM and HEX primer sets were used to determine editing efficiency. Briefly, the number of droplet counts harboring the intended edit is determined using a FAM primer set that targets the correct edited sequence (e.g., for RTTs harboring an integration sequence, the integration sequence). The number of total FXN sequencing droplet counts was determined by a HEX primer set which targets a different region of the FAN gene that is multiple kilobases away from the edited location. Editing efficiency for experimental samples was interpolated from a standard curve of reference samples containing various editing % (from 0 to 100%).

### Example 2—Dual Prime Editing for Excision of GAA Repeats in FXN Gene in Wild-Type HEK293T Cells

[0908] PEgRNA pairs were designed to excise GAA repeats in intron 1 of the FXN gene and insert an exogenous attB sequence. Amplification primers were designed to encompass chromosomal locations corresponding to protospacers on both the 5′ flanking and 3′ flanking regions of the edited region of the FXN gene to identify correct editing events.

[0909] PEgRNAs were assembled using method (3) as described in Example 1.

[0910] Wild-type HEK 293T cells harboring 6 GAA repeats in the FXN intron 1 were used to examine editing efficiency of PEgRNAs. The HEK293T cells were transfected and genomic DNA extracted analysis of editing efficiency as described in Example 1.

[0911] Wild-type HEK 293T cells harboring 6 GAA repeats in the FXN intron 1 were used to examine editing efficiency of PEgRNAs for excising GAA repeats. gRNA amplification primers were designed to encompass all spacers on both the 5′ flanking and 3′ flanking regions of the edited region for sequencing on a MiSeq 600 cycle.

[0912] Table 68A summarizes dual prime editing efficiency using 216 PEgRNA pairs, measured by MiSeq 600 cycle as described in Example 1. The 3′ PEgRNA SEQ ID NOs are shown in the first column, and the 5′ PEgRNA SEQ ID NOs are shown in the second row. Editing efficiency (%) of editing with PEgRNA pair is provided in the cell of Table 68A where the 5′ PEgRNA SEQ ID NO and the 3′ PEgRNA SEQ ID NO intersect. Tables 68B and 68C provide a summary of the 5′ and 3′ PEgRNAs and their components used in the dual prime editing, respectively.

TABLE 68A
Summary of dual prime editing result (%
editing efficiency²) in HEK293T cells

| 3′ PEgRNA | 5′PEgRNA SEQ ID NO¹ | | | | | |
|---|---|---|---|---|---|---|
| SEQ ID NO¹ | 22 | 24* | 122 | 124 | 255 | 257 |
| 652 | +++ | +++ | NA | ++++ | ++++ | +++ |
| 654 | +++ | +++ | +++ | ++++ | +++ | +++ |
| 761 | +++ | +++ | +++ | +++ | +++ | ++ |
| 763 | ++ | ++ | ++ | ++ | ++ | ++ |
| 790 | ++ | +++ | +++ | +++ | ++ | ++ |
| 788* | +++ | +++ | +++ | +++ | +++ | +++ |
| 817 | +++ | +++ | ++ | +++ | ++ | ++ |
| 819 | + | ++ | ++ | ++ | ++ | + |
| 844 | ++ | +++ | ++ | ++ | ++ | ++ |
| 846* | ++ | ++ | ++ | ++ | ++ | ++ |
| 875 | +++ | +++ | ++++ | ++++ | +++ | +++ |
| 873* | +++ | +++ | +++ | ++++ | +++ | +++ |
| 904 | +++ | ++ | ++ | +++ | ++ | ++ |
| 902* | +++ | ++ | ++ | ++ | ++ | ++ |
| 931 | + | + | + | + | + | + |
| 933 | ++ | + | + | ++ | + | + |
| 960 | +++ | ++ | ++ | ++ | + | + |
| 958* | ++ | ++ | ++ | +++ | ++ | ++ |
| 984 | +++ | +++ | ++ | +++ | ++ | +++ |
| 986 | +++ | ++ | +++ | +++ | ++ | +++ |
| 1011 | +++ | ++ | +++ | +++ | +++ | ++ |
| 1013 | +++ | +++ | +++ | ++++ | ++ | ++ |
| 1038* | +++ | +++ | +++ | ++++ | ++++ | +++ |
| 1040* | +++ | +++ | ++++ | ++++ | +++ | +++ |
| 1153 | +++ | ++ | ++ | +++ | + | +++ |
| 1155 | +++ | ++ | +++ | +++ | ++ | +++ |
| 1180 | ++ | ++ | ++ | +++ | ++ | ++ |
| 1182 | ++ | ++ | ++ | +++ | + | ++ |
| 1207 | +++ | + | +++ | +++ | +++ | ++ |
| 1209* | +++ | +++ | +++ | ++++ | ++ | ++ |
| 1236 | +++ | +++ | +++ | +++ | +++ | +++ |
| 1238 | +++ | +++ | +++ | ++++ | +++ | +++ |
| 1345 | +++ | ++ | ++ | +++ | ++ | ++ |
| 1347 | ++ | + | + | ++ | + | + |
| 1372 | + | + | + | ++ | + | + |
| 1374* | ++ | ++ | ++ | ++ | + | ++ |

¹The PEgRNA sequences used experimentally further contained transcription adaptations for a U6 expression construct, i.e., addition of a 5′ G if the first nucleotide is not a G, addition of 1-7 Us from the U6 transcription termination sequence, e.g., 4 additional Us as a result of transcription from U6 termination sequence. The PEgRNA sequences used experimentally for SEQ ID NOs annotated with an aster “*” further containedan additional A between 3′ end of the PBS and the U6 termination sequence.
²The following scale was used in scoring efficiency: PEgRNA pairs exhibiting editing efficiency between 0% to 15% are indicated with “+”, PEgRNA pairs exhibiting editing efficiency of 15% to 25% are indicated with “++”, and PERNA pairs exhibiting editing efficiency of 25% to 40% are indicated with “+++”, and PEgRNA pairs exhibiting editing efficiency of 40% to 100% are indicated with “++++”.

TABLE 68B
Summary of 5′ PEgRNAs used

| 5′ PEgRNA | 5′ Spacer | | |
|---|---|---|---|
| SEQ ID NO | SEQ ID NO | 5′ PBS sequence NO | 5′ PBS length |
| 22 | 1 | 12 | 10 |
| 24 | 1 | 14 | 12 |
| 122 | 101 | 112 | 10 |
| 124 | 101 | 114 | 12 |
| 255 | 234 | 245 | 10 |
| 257 | 234 | 247 | 12 |

TABLE 68C
Summary of 3′ PEgRNAs used

| 3′ PEgRNA | 3′ Spacer | 3′ PBS | |
|---|---|---|---|
| SEQ ID NO | SEQ ID NO | SEQ ID NO | 3′ PBS length |
| 652 | 631 | 644 | 12 |
| 654 | 631 | 642 | 10 |
| 761 | 740 | 753 | 12 |
| 763 | 740 | 751 | 10 |
| 790 | 767 | 778 | 10 |
| 817 | 796 | 809 | 12 |
| 819 | 796 | 807 | 10 |
| 844 | 823 | 836 | 12 |
| 875 | 852 | 863 | 10 |
| 904 | 881 | 892 | 10 |
| 931 | 910 | 923 | 12 |
| 933 | 910 | 921 | 10 |
| 960 | 937 | 949 | 11 |
| 984 | 966 | 976 | 12 |
| 986 | 966 | 974 | 10 |
| 1011 | 990 | 1003 | 12 |
| 1013 | 990 | 1001 | 10 |
| 1153 | 1132 | 1145 | 12 |
| 1155 | 1132 | 1143 | 10 |
| 1180 | 1159 | 1172 | 12 |
| 1182 | 1159 | 1170 | 10 |
| 1207 | 1186 | 1199 | 12 |
| 1236 | 1215 | 1228 | 12 |
| 1238 | 1215 | 1226 | 10 |
| 1345 | 1324 | 1337 | 12 |
| 1347 | 1324 | 1335 | 10 |
| 1372 | 1351 | 1364 | 12 |
| 1038 | 1017 | 1030 | 12 |
| 1040 | 1017 | 1028 | 10 |
| 1209 | 1186 | 1197 | 10 |
| 1374 | 1351 | 1362 | 10 |
| 788 | 767 | 780 | 12 |
| 846 | 823 | 834 | 10 |
| 873 | 852 | 865 | 12 |
| 902 | 881 | 894 | 12 |
| 958 | 937 | 950 | 12 |

[0913] Table 69A shows the dual prime editing efficiency and indel level results of the various 3′ PEgRNA and 5′ PEgRNA combinations screened. The 3′ PEgRNA SEQ ID NOs are provided in the first column, and the 5′ PEgRNA SEQ ID NOs are provided in the second row. Editing efficiency and indel frequency of each PEgRNA pair is provided in the cell where the 5′ PEgRNA SEQ ID NO and the 3′ PEgRNA SEQ ID NO intersect. Tables 69B and 69C provide a summary of the 5′ and 3′ PEgRNAs and their components used in the dual prime editing, respectively.

TABLE 69A
Summary of dual prime editing result (% editing efficiency) in HEK293T cells

| | Editing | | | | | | | | | | | | | | | |
|---|---|---|---|---|---|---|---|---|---|---|---|---|---|---|---|---|
| | Efficiency/ | | | | | | | | | | | | | | | |
| 5′ PEgRNA | Indel | 3′ PEgRNA SEQ ID NO | | | | | | | | | | | | | | |
| SEQ ID NO¹ | frequency² | 503 | 505 | 508 | 532 | 538 | 563 | 565 | 568 | 592 | 594 | 597 | 621 | 627 | 534* | 623* |
| 352 | % Editing | ++ | +++ | + | ++++ | ++++ | ++++ | ++++ | ++++ | ++++ | ++++ | ++++ | ++++ | ++++ | ++++ | ++++ |
| | efficiency | | | | | | | | | | | | | | | |
| | % Indels | + | + | + | + | + | + | + | + | + | + | + | + | + | + | + |
| 354 | % Editing | ++ | + | + | ++++ | +++ | ++++ | ++++ | ++++ | ++++ | ++++ | ++++ | ++++ | ++++ | ++++ | ++++ |
| | efficiency | | | | | | | | | | | | | | | |
| | % Indels | + | + | + | + | + | + | + | + | + | + | + | + | + | + | + |
| 361* | % Editing | ++ | ++ | + | ++++ | ++++ | ++++ | ++++ | ++++ | ++++ | ++++ | ++++ | ++++ | ++++ | ++++ | ++++ |
| | efficiency | | | | | | | | | | | | | | | |
| | % Indels | + | + | + | + | + | + | + | + | + | + | + | + | + | + | + |
| 383 | % Editing | ++ | ++ | + | +++ | +++ | ++++ | ++++ | ++++ | ++++ | ++++ | ++++ | ++++ | ++++ | ++++ | ++++ |
| | efficiency | | | | | | | | | | | | | | | |
| | % Indels | + | + | + | + | + | + | + | + | + | + | + | + | + | + | + |
| 385 | % Editing | + | + | + | ++++ | ++++ | ++++ | ++++ | ++++ | ++++ | ++++ | ++++ | ++++ | ++++ | +++ | ++++ |
| | efficiency | | | | | | | | | | | | | | | |
| | % Indels | + | + | + | + | + | + | + | + | + | + | + | + | + | + | + |
| 388 | % Editing | + | ++ | + | ++++ | ++++ | ++++ | ++++ | ++++ | ++++ | ++++ | ++++ | ++++ | ++++ | ++++ | ++++ |
| | efficiency | | | | | | | | | | | | | | | |
| | % Indels | + | + | + | + | + | + | + | + | + | + | + | + | + | + | + |
| 414 | % Editing | + | + | + | ++++ | +++ | ++++ | ++++ | ++++ | ++++ | ++++ | ++++ | ++++ | ++++ | ++++ | ++++ |
| | efficiency | | | | | | | | | | | | | | | |
| | % Indels | + | + | + | + | + | + | + | + | + | + | + | + | + | + | + |
| 418 | % Editing | + | + | + | +++ | +++ | ++++ | ++++ | ++++ | ++++ | ++++ | ++++ | ++++ | ++++ | +++ | ++++ |
| | efficiency | | | | | | | | | | | | | | | |
| | % Indels | + | + | + | + | + | + | + | + | + | + | + | + | + | + | + |
| 412* | % Editing | ++ | ++ | + | ++++ | +++ | ++++ | ++++ | ++++ | ++++ | ++++ | ++++ | ++++ | ++++ | ++++ | ++++ |
| | efficiency | | | | | | | | | | | | | | | |
| | % Indels | + | + | + | + | + | + | + | + | + | + | + | + | + | + | + |
| 443 | % Editing | +++ | ++ | + | ++++ | ++++ | ++++ | ++++ | ++++ | ++++ | ++++ | ++++ | ++++ | ++++ | ++++ | ++++ |
| | efficiency | | | | | | | | | | | | | | | |
| | % Indels | + | + | + | + | + | + | + | + | + | + | + | + | + | + | + |
| 445 | % Editing | ++ | + | + | ++++ | +++ | ++++ | ++++ | ++++ | ++++ | ++++ | ++++ | ++++ | ++++ | ++++ | ++++ |
| | efficiency | | | | | | | | | | | | | | | |
| | % Indels | + | + | + | + | + | + | + | + | + | + | + | + | + | + | + |
| 448 | % Editing | +++ | +++ | + | ++++ | ++++ | ++++ | ++++ | ++++ | ++++ | ++++ | ++++ | ++++ | ++++ | ++++ | ++++ |
| | efficiency | | | | | | | | | | | | | | | |
| | % Indels | + | + | + | + | + | + | + | + | + | + | + | + | + | + | + |
| 472 | % Editing | + | + | + | ++ | ++ | ++++ | ++++ | ++++ | ++++ | ++++ | ++++ | ++++ | ++++ | ++++ | ++++ |
| | efficiency | | | | | | | | | | | | | | | |
| | % Indels | + | + | + | + | + | + | + | + | + | + | + | + | + | + | + |
| 478 | % Editing | + | + | + | +++ | ++ | ++++ | ++++ | ++++ | ++++ | ++++ | ++++ | ++++ | ++++ | +++ | ++++ |
| | efficiency | | | | | | | | | | | | | | | |
| | % Indels | + | + | + | + | + | + | + | + | + | + | + | + | + | + | + |
| 474* | % Editing | + | + | + | +++ | +++ | ++++ | ++++ | ++++ | ++++ | ++++ | ++++ | ++++ | ++++ | ++++ | ++++ |
| | efficiency | | | | | | | | | | | | | | | |
| | % Indels | + | + | + | + | + | + | + | + | + | + | + | + | + | + | + |

¹The PEgRNA sequences used experimentally further contained transcription adaptations for a U6 expression construct, i.e., addition of a 5′ G if the first nucleotide is not a G, addition of 1-7 Us from the U6 transcription termination sequence, e.g., 4 additional Us as a result of transcription from U6 termination sequence. The PEgRNA sequences used experimentally for SEQ ID NOs annotated with an asterisk “*” further contained an additional A between 3′ end of the PBS and the U6 termination sequence.
²Editing efficiency between 0% to 15% are indicated with “+”, PEgRNA pairs exhibiting editing efficiency of 15% to 25% are indicated with “++”, and PEgRNA pairs exhibiting editing efficiency of 25% to 40% are indicated with “+++”, and PEgRNA pairs exhibiting editing efficiency of 40% to 100% are indicated with “++++”.

TABLE 69B
Summary of 5′ PEgRNAs used

| 5′ PEgRNA | | | |
|---|---|---|---|
| SEQ ID NO (no | 5′ spacer | 5′ PBS | |
| addition) | SEQ ID NO | SEQ ID NO | 5′ PBS length |
| 352 | 331 | 343 | 11 |
| 354 | 331 | 345 | 13 |
| 361 | 331 | 340 | 8 |
| 383 | 362 | 373 | 10 |
| 385 | 362 | 375 | 12 |
| 388 | 362 | 371 | 8 |
| 412 | 391 | 402 | 10 |
| 414 | 391 | 405 | 13 |
| 418 | 391 | 400 | 8 |
| 443 | 422 | 433 | 10 |
| 445 | 422 | 435 | 12 |
| 448 | 422 | 431 | 8 |
| 472 | 451 | 462 | 10 |
| 474 | 451 | 464 | 12 |
| 478 | 451 | 460 | 8 |

TABLE 69C
Summary of 3′ PEgRNAs used

| 3′ PEgRNA | 3′ spacer | 3′ PBS | |
|---|---|---|---|
| SEQ ID NO | SEQ ID NO | SEQ ID NO | 3′ PBS length |
| 503 | 482 | 493 | 10 |
| 505 | 482 | 495 | 12 |
| 508 | 482 | 491 | 8 |
| 532 | 511 | 522 | 10 |
| 534 | 511 | 524 | 12 |
| 538 | 511 | 520 | 8 |
| 563 | 542 | 553 | 10 |
| 565 | 542 | 555 | 12 |
| 568 | 542 | 551 | 8 |
| 592 | 571 | 582 | 10 |
| 594 | 571 | 584 | 12 |
| 597 | 571 | 580 | 8 |
| 621 | 600 | 611 | 10 |
| 627 | 600 | 609 | 8 |
| 623 | 600 | 613 | 12 |

### Example 3—Dual Prime Editing for Excision of GAA Repeats in FXN Gene in Wild Type HEK293T Cells

[0914] Additional 3′ PEgRNAs were designed for excision of GAA repeats and insertion of an attB sequence in intron 1 of the FXN gene. Editing efficiency was examined for each of the 3′ PEgRNAs paired with a 5′ PEgRNA having the sequence of SEQ ID NO: 124, which has a spacer having the sequence of SEQ ID NO: 101 and a 12-nt PBS having the sequence of SEQ ID NO: 114. The PEgRNAs were assembled, wild type HEK293T cells transfected, and genomic DNA extracted after transfection as described in Example 1. After extraction, genomic DNA was sequenced and analyzed with ddPCR as described in Example 1.

[0915] The SEQ ID NOs for the PEgRNAs and their respective components, and the editing efficiency results, are provided below in Table 70. For each pair of PEgRNAs, the reported editing efficiency is the average of three biological replicates. Three replicates of no-treatment controls (NTCs) were included, where HEK293T cells were cultured and plated in the same way as the edited cells but not contacted with polynucleotides encoding the prime editor or PEgRNA. Dual prime editing efficiency above the no-treatment control level was observed in HEK293T cells edited with each of the 3′ PEgRNAs when paired with 5′ PEgRNA of SEQ ID NO: 124.

TABLE 70
Summary of PEgRNA pair editing efficiency
of GAA repeats in the FXN gene

| 3′ PEgRNA | 3′ spacer | 3′ PBS | 3′ PBS | |
|---|---|---|---|---|
| SEQ ID NO¹ | SEQ ID NO | SEQ ID NO | length | % Editing² |
| 1401 | 1380 | 1393 | 12 | + |
| 1403 | 1380 | 1391 | 10 | + |
| 1426 | 1405 | 1418 | 12 | ++ |
| 1428 | 1405 | 1416 | 10 | +++ |
| 1451 | 1430 | 1443 | 12 | + |
| 1453 | 1430 | 1441 | 10 | ++ |
| 1476 | 1455 | 1468 | 12 | + |
| 1478 | 1455 | 1466 | 10 | + |
| 1501 | 1480 | 1493 | 12 | +++ |
| 1503 | 1480 | 1491 | 10 | +++ |
| 1524 | 1505 | 1516 | 12 | +++ |
| 1526 | 1505 | 1514 | 10 | ++ |
| 1549 | 1528 | 1541 | 12 | ++ |
| 1551 | 1528 | 1539 | 10 | + |
| 1574 | 1553 | 1566 | 12 | +++ |
| 1576 | 1553 | 1564 | 10 | ++ |
| 1599 | 1578 | 1591 | 12 | + |
| 1601 | 1578 | 1589 | 10 | ++ |
| 1624 | 1603 | 1616 | 12 | +++ |
| 1626 | 1603 | 1614 | 10 | ++ |
| 1649 | 1628 | 1641 | 12 | +++ |
| 1651 | 1628 | 1639 | 10 | +++ |
| 1674 | 1653 | 1666 | 12 | + |
| 1676 | 1653 | 1664 | 10 | + |
| 1699 | 1678 | 1691 | 12 | ++ |
| 1701 | 1678 | 1689 | 10 | + |
| 1724 | 1703 | 1716 | 12 | +++ |
| 1726 | 1703 | 1714 | 10 | ++ |
| 1749 | 1728 | 1741 | 12 | ++ |
| 1751 | 1728 | 1739 | 10 | +++ |
| 1773 | 1753 | 1765 | 12 | +++ |
| 1775 | 1753 | 1763 | 10 | +++ |
| 1798 | 1777 | 1790 | 12 | + |
| 1800 | 1777 | 1788 | 10 | + |
| 1823 | 1802 | 1815 | 12 | ++ |
| 1825 | 1802 | 1813 | 10 | ++ |
| 1844 | 1827 | 1836 | 12 | + |
| 1846 | 1827 | 1834 | 10 | + |
| 1869 | 1848 | 1861 | 12 | + |
| 1871 | 1848 | 1859 | 10 | + |
| 1894 | 1873 | 1886 | 12 | + |
| 1896 | 1873 | 1884 | 10 | + |
| 1919 | 1898 | 1911 | 12 | + |
| 1921 | 1898 | 1909 | 10 | + |
| 1943 | 1923 | 1935 | 12 | + |
| 1945 | 1923 | 1933 | 10 | ++ |
| 1968 | 1947 | 1960 | 12 | ++ |
| 1970 | 1947 | 1958 | 10 | + |
| NTC | NA | NA | NA | − |
| NTC | NA | NA | NA | − |
| NTC | NA | NA | NA | − |

¹The PEgRNA sequences used experimentally further contained transcription adaptations for a U6 expression construct, i.e., addition of a 5′ G if the first nucleotide is not a G, addition of 1-7 Us from the U6 transcription termination sequence, e.g., 4 additional Us as a result of transcription from U6 termination sequence. NTC: no-treatment control.
²−: 0% to 8.00%; +: 8.00% to 13.42%; ++: 13.42% to 18.83%; +++: 18.83% to 24.24%. Standard deviation is not separately provided. For data points where the average editing efficiency and (average efficiency − 2* standard deviation) are in different ranges, (average efficiency − 2* standard deviation) is used.

### Example 4—Dual Prime Editing for Excision of GAA Repeats in FXN Gene in Wild-Type HEK293T Cells

[0916] PEgRNA pairs having a region of complementarity between the 5′ RTT and the 3′ RTT were examined for editing efficiency in HEK293T cells. The 5′ PEgRNAs have a spacer with the sequence of SEQ ID NO 1, 101, or 234, and the 3′ PEgRNAs having a spacer with the sequence of SEQ ID NO 631, 1017, or 1215. For each spacer pair, 20 RTT pairs were tested. A PBS length of 10 nucleotides was used. Sequences of the PEgRNAs and components are provided in Tables 1-56. The complementarity region lengths and GC of each pair of RTTs are summarized in Table 56.

[0917] PEgRNAs were assembled, and HEK293T cells were transfected and genomic DNA harvested as described in Example 1. The genomic DNA was sequenced by ddPCR as described in Example 1. The number of sequencing reads harboring the intended edit is determined using a FAM primer set that targets the FXN sequences directly upstream/downstream of the nicks. FAM/HEX ratio was used as a proxy to estimate editing efficiency.

[0918] The SEQ ID NOs for the PEgRNAs and their respective components, and the editing efficiency results, are provided below in Table 71. For each pair of PEgRNAs, the reported editing efficiency is average of three biological replicates. A no-treatment negative control was included, where HEK293T cells were cultured and plated in the same way as the edited cells but not contacted with polynucleotides encoding the prime editor or PEgRNA.

TABLE 71
Estimated Editing Efficiency by FAM/HEX ratio for PEgRNA pairs

| 5′ PEgRNA | 5′ spacer | 5′ PBS | 3′ PEgRNA | 3′ spacer | 3′ PBS | RTT | FAM/ |
|---|---|---|---|---|---|---|---|
| SEQ | SEQ | SEQ | SEQ | SEQ | SEQ | pairing | HEX |
| ID NO¹ | ID NO | ID NO | ID NO | ID NO | ID NO | NO² | ratio³ |
| 60 | 1 | 12 | 690 | 631 | 642 | 19 | − |
| 58 | 1 | 12 | 688 | 631 | 642 | 18 | + |
| 46 | 1 | 12 | 676 | 631 | 642 | 12 | + |
| 32 | 1 | 12 | 662 | 631 | 642 | 5 | + |
| 52 | 1 | 12 | 682 | 631 | 642 | 15 | + |
| 36 | 1 | 12 | 666 | 631 | 642 | 7 | + |
| 62 | 1 | 12 | 692 | 631 | 642 | 20 | + |
| 28 | 1 | 12 | 658 | 631 | 642 | 3 | ++ |
| 48 | 1 | 12 | 678 | 631 | 642 | 13 | ++ |
| 54 | 1 | 12 | 684 | 631 | 642 | 16 | ++ |
| 40 | 1 | 12 | 670 | 631 | 642 | 9 | ++ |
| 34 | 1 | 12 | 664 | 631 | 642 | 6 | ++ |
| 26 | 1 | 12 | 656 | 631 | 642 | 2 | ++ |
| 38 | 1 | 12 | 668 | 631 | 642 | 8 | ++ |
| 42 | 1 | 12 | 672 | 631 | 642 | 10 | ++ |
| 56 | 1 | 12 | 686 | 631 | 642 | 17 | ++ |
| 30 | 1 | 12 | 660 | 631 | 642 | 4 | ++ |
| 44 | 1 | 12 | 674 | 631 | 642 | 11 | +++ |
| 50 | 1 | 12 | 680 | 631 | 642 | 14 | ++++ |
| 64 | 1 | 12 | 694 | 631 | 642 | 1# | ++++ |
| 60 | 1 | 12 | 1076 | 1017 | 1028 | 19 | − |
| 62 | 1 | 12 | 1078 | 1017 | 1028 | 20 | + |
| 58 | 1 | 12 | 1074 | 1017 | 1028 | 18 | + |
| 52 | 1 | 12 | 1068 | 1017 | 1028 | 15 | + |
| 34 | 1 | 12 | 1050 | 1017 | 1028 | 6 | + |
| 28 | 1 | 12 | 1044 | 1017 | 1028 | 3 | + |
| 32 | 1 | 12 | 1048 | 1017 | 1028 | 5 | + |
| 36 | 1 | 12 | 1052 | 1017 | 1028 | 7 | + |
| 54 | 1 | 12 | 1070 | 1017 | 1028 | 16 | ++ |
| 56 | 1 | 12 | 1072 | 1017 | 1028 | 17 | ++ |
| 46 | 1 | 12 | 1062 | 1017 | 1028 | 12 | ++ |
| 50 | 1 | 12 | 1066 | 1017 | 1028 | 14 | ++ |
| 26 | 1 | 12 | 1042 | 1017 | 1028 | 2 | ++ |
| 30 | 1 | 12 | 1046 | 1017 | 1028 | 4 | ++ |
| 42 | 1 | 12 | 1058 | 1017 | 1028 | 10 | ++ |
| 48 | 1 | 12 | 1064 | 1017 | 1028 | 13 | ++ |
| 40 | 1 | 12 | 1056 | 1017 | 1028 | 9 | ++ |
| 44 | 1 | 12 | 1060 | 1017 | 1028 | 11 | +++ |
| 38 | 1 | 12 | 1054 | 1017 | 1028 | 8 | +++ |
| 64 | 1 | 12 | 1080 | 1017 | 1028 | 1# | ++++ |
| 28 | 1 | 12 | 1242 | 1215 | 1226 | 3 | + |
| 52 | 1 | 12 | 1266 | 1215 | 1226 | 15 | + |
| 32 | 1 | 12 | 1246 | 1215 | 1226 | 5 | + |
| 26 | 1 | 12 | 1240 | 1215 | 1226 | 2 | + |
| 36 | 1 | 12 | 1250 | 1215 | 1226 | 7 | + |
| 38 | 1 | 12 | 1252 | 1215 | 1226 | 8 | + |
| 30 | 1 | 12 | 1244 | 1215 | 1226 | 4 | + |
| 58 | 1 | 12 | 1272 | 1215 | 1226 | 18 | ++ |
| 40 | 1 | 12 | 1254 | 1215 | 1226 | 9 | ++ |
| 34 | 1 | 12 | 1248 | 1215 | 1226 | 6 | ++ |
| 54 | 1 | 12 | 1268 | 1215 | 1226 | 16 | ++ |
| 56 | 1 | 12 | 1270 | 1215 | 1226 | 17 | ++ |
| 48 | 1 | 12 | 1262 | 1215 | 1226 | 13 | ++ |
| 44 | 1 | 12 | 1258 | 1215 | 1226 | 11 | ++ |
| 42 | 1 | 12 | 1256 | 1215 | 1226 | 10 | ++ |
| 46 | 1 | 12 | 1260 | 1215 | 1226 | 12 | ++ |
| 60 | 1 | 12 | 1274 | 1215 | 1226 | 19 | ++ |
| 50 | 1 | 12 | 1264 | 1215 | 1226 | 14 | +++ |
| 62 | 1 | 12 | 1276 | 1215 | 1226 | 20 | +++ |
| 64 | 1 | 12 | 1278 | 1215 | 1226 | 1# | ++++ |
| 158 | 101 | 112 | 688 | 631 | 642 | 18 | − |
| 160 | 101 | 112 | 690 | 631 | 642 | 19 | + |
| 146 | 101 | 112 | 676 | 631 | 642 | 12 | + |
| 132 | 101 | 112 | 662 | 631 | 642 | 5 | + |
| 162 | 101 | 112 | 692 | 631 | 642 | 20 | + |
| 136 | 101 | 112 | 666 | 631 | 642 | 7 | + |
| 128 | 101 | 112 | 658 | 631 | 642 | 3 | + |
| 134 | 101 | 112 | 664 | 631 | 642 | 6 | + |
| 152 | 101 | 112 | 682 | 631 | 642 | 15 | + |
| 164 | 101 | 112 | 694 | 631 | 642 | 1# | + |
| 148 | 101 | 112 | 678 | 631 | 642 | 13 | + |
| 156 | 101 | 112 | 686 | 631 | 642 | 17 | + |
| 140 | 101 | 112 | 670 | 631 | 642 | 9 | ++ |
| 144 | 101 | 112 | 674 | 631 | 642 | 11 | ++ |
| 142 | 101 | 112 | 672 | 631 | 642 | 10 | ++ |
| 154 | 101 | 112 | 684 | 631 | 642 | 16 | ++ |
| 130 | 101 | 112 | 660 | 631 | 642 | 4 | ++ |
| 126 | 101 | 112 | 656 | 631 | 642 | 2 | ++ |
| 150 | 101 | 112 | 680 | 631 | 642 | 14 | ++ |
| 138 | 101 | 112 | 668 | 631 | 642 | 8 | ++ |
| 160 | 101 | 112 | 1076 | 1017 | 1028 | 19 | − |
| 162 | 101 | 112 | 1078 | 1017 | 1028 | 20 | − |
| 158 | 101 | 112 | 1074 | 1017 | 1028 | 18 | + |
| 134 | 101 | 112 | 1050 | 1017 | 1028 | 6 | + |
| 152 | 101 | 112 | 1068 | 1017 | 1028 | 15 | + |
| 128 | 101 | 112 | 1044 | 1017 | 1028 | 3 | + |
| 136 | 101 | 112 | 1052 | 1017 | 1028 | 7 | + |
| 132 | 101 | 112 | 1048 | 1017 | 1028 | 5 | + |
| 156 | 101 | 112 | 1072 | 1017 | 1028 | 17 | + |
| 130 | 101 | 112 | 1046 | 1017 | 1028 | 4 | + |
| 164 | 101 | 112 | 1080 | 1017 | 1028 | 1# | + |
| 144 | 101 | 112 | 1060 | 1017 | 1028 | 11 | + |
| 142 | 101 | 112 | 1058 | 1017 | 1028 | 10 | + |
| 154 | 101 | 112 | 1070 | 1017 | 1028 | 16 | ++ |
| 150 | 101 | 112 | 1066 | 1017 | 1028 | 14 | ++ |
| 126 | 101 | 112 | 1042 | 1017 | 1028 | 2 | ++ |
| 148 | 101 | 112 | 1064 | 1017 | 1028 | 13 | ++ |
| 146 | 101 | 112 | 1062 | 1017 | 1028 | 12 | ++ |
| 140 | 101 | 112 | 1056 | 1017 | 1028 | 9 | ++ |
| 138 | 101 | 112 | 1054 | 1017 | 1028 | 8 | ++ |
| 128 | 101 | 112 | 1242 | 1215 | 1226 | 3 | + |
| 136 | 101 | 112 | 1250 | 1215 | 1226 | 7 | + |
| 126 | 101 | 112 | 1240 | 1215 | 1226 | 2 | + |
| 134 | 101 | 112 | 1248 | 1215 | 1226 | 6 | + |
| 132 | 101 | 112 | 1246 | 1215 | 1226 | 5 | + |
| 130 | 101 | 112 | 1244 | 1215 | 1226 | 4 | + |
| 158 | 101 | 112 | 1272 | 1215 | 1226 | 18 | + |
| 156 | 101 | 112 | 1270 | 1215 | 1226 | 17 | + |
| 162 | 101 | 112 | 1276 | 1215 | 1226 | 20 | + |
| 138 | 101 | 112 | 1252 | 1215 | 1226 | 8 | + |
| 140 | 101 | 112 | 1254 | 1215 | 1226 | 9 | + |
| 142 | 101 | 112 | 1256 | 1215 | 1226 | 10 | + |
| 144 | 101 | 112 | 1258 | 1215 | 1226 | 11 | + |
| 154 | 101 | 112 | 1268 | 1215 | 1226 | 16 | + |
| 164 | 101 | 112 | 1278 | 1215 | 1226 | 1# | + |
| 148 | 101 | 112 | 1262 | 1215 | 1226 | 13 | + |
| 150 | 101 | 112 | 1264 | 1215 | 1226 | 14 | ++ |
| 160 | 101 | 112 | 1274 | 1215 | 1226 | 19 | ++ |
| 146 | 101 | 112 | 1260 | 1215 | 1226 | 12 | ++ |
| 152 | 101 | 112 | 1266 | 1215 | 1226 | 15 | ++ |
| 289 | 234 | 245 | 686 | 631 | 642 | 17 | − |
| 291 | 234 | 245 | 688 | 631 | 642 | 18 | − |
| 293 | 234 | 245 | 690 | 631 | 642 | 19 | − |
| 261 | 234 | 245 | 658 | 631 | 642 | 3 | − |
| 295 | 234 | 245 | 692 | 631 | 642 | 20 | − |
| 271 | 234 | 245 | 668 | 631 | 642 | 8 | − |
| 273 | 234 | 245 | 670 | 631 | 642 | 9 | − |
| 287 | 234 | 245 | 684 | 631 | 642 | 16 | + |
| 267 | 234 | 245 | 664 | 631 | 642 | 6 | + |
| 277 | 234 | 245 | 674 | 631 | 642 | 11 | + |
| 281 | 234 | 245 | 678 | 631 | 642 | 13 | + |
| 275 | 234 | 245 | 672 | 631 | 642 | 10 | + |
| 265 | 234 | 245 | 662 | 631 | 642 | 5 | + |
| 279 | 234 | 245 | 676 | 631 | 642 | 12 | + |
| 263 | 234 | 245 | 660 | 631 | 642 | 4 | + |
| 259 | 234 | 245 | 656 | 631 | 642 | 2 | + |
| 285 | 234 | 245 | 682 | 631 | 642 | 15 | + |
| 269 | 234 | 245 | 666 | 631 | 642 | 7 | + |
| 283 | 234 | 245 | 680 | 631 | 642 | 14 | +++ |
| 297 | 234 | 245 | 694 | 631 | 642 | 1# | ++++ |
| 265 | 234 | 245 | 1048 | 1017 | 1028 | 5 | − |
| 261 | 234 | 245 | 1044 | 1017 | 1028 | 3 | − |
| 267 | 234 | 245 | 1050 | 1017 | 1028 | 6 | − |
| 275 | 234 | 245 | 1058 | 1017 | 1028 | 10 | − |
| 259 | 234 | 245 | 1042 | 1017 | 1028 | 2 | − |
| 281 | 234 | 245 | 1064 | 1017 | 1028 | 13 | − |
| 293 | 234 | 245 | 1076 | 1017 | 1028 | 19 | − |
| 263 | 234 | 245 | 1046 | 1017 | 1028 | 4 | + |
| 279 | 234 | 245 | 1062 | 1017 | 1028 | 12 | + |
| 271 | 234 | 245 | 1054 | 1017 | 1028 | 8 | + |
| 291 | 234 | 245 | 1074 | 1017 | 1028 | 18 | + |
| 277 | 234 | 245 | 1060 | 1017 | 1028 | 11 | + |
| 273 | 234 | 245 | 1056 | 1017 | 1028 | 9 | + |
| 287 | 234 | 245 | 1070 | 1017 | 1028 | 16 | + |
| 289 | 234 | 245 | 1072 | 1017 | 1028 | 17 | + |
| 285 | 234 | 245 | 1068 | 1017 | 1028 | 15 | + |
| 269 | 234 | 245 | 1052 | 1017 | 1028 | 7 | + |
| 295 | 234 | 245 | 1078 | 1017 | 1028 | 20 | + |
| 283 | 234 | 245 | 1066 | 1017 | 1028 | 14 | ++ |
| 297 | 234 | 245 | 1080 | 1017 | 1028 | 1# | ++++ |
| 277 | 234 | 245 | 1258 | 1215 | 1226 | 11 | − |
| 263 | 234 | 245 | 1244 | 1215 | 1226 | 4 | − |
| 275 | 234 | 245 | 1256 | 1215 | 1226 | 10 | − |
| 269 | 234 | 245 | 1250 | 1215 | 1226 | 7 | − |
| 261 | 234 | 245 | 1242 | 1215 | 1226 | 3 | − |
| 265 | 234 | 245 | 1246 | 1215 | 1226 | 5 | − |
| 279 | 234 | 245 | 1260 | 1215 | 1226 | 12 | − |
| 281 | 234 | 245 | 1262 | 1215 | 1226 | 13 | − |
| 267 | 234 | 245 | 1248 | 1215 | 1226 | 6 | − |
| 271 | 234 | 245 | 1252 | 1215 | 1226 | 8 | − |
| 273 | 234 | 245 | 1254 | 1215 | 1226 | 9 | + |
| 259 | 234 | 245 | 1240 | 1215 | 1226 | 2 | + |
| 291 | 234 | 245 | 1272 | 1215 | 1226 | 18 | + |
| 289 | 234 | 245 | 1270 | 1215 | 1226 | 17 | + |
| 295 | 234 | 245 | 1276 | 1215 | 1226 | 20 | ++ |
| 293 | 234 | 245 | 1274 | 1215 | 1226 | 19 | ++ |
| 287 | 234 | 245 | 1268 | 1215 | 1226 | 16 | ++ |
| 283 | 234 | 245 | 1264 | 1215 | 1226 | 14 | ++ |
| 285 | 234 | 245 | 1266 | 1215 | 1226 | 15 | +++ |
| 297 | 234 | 245 | 1278 | 1215 | 1226 | 1# | ++++ |
| NTC | NA | NA | NTC | NA | NA | NA | − |

¹The PEgRNA sequences used experimentally further contained transcriptation adaptations for a U6 expression construct, i.e., addition of a 5′ G if the first nucleotide is not a G, addition of 1-7 Us from the U6 transcription termination sequence, e.g., 4 additional Us as a result of transcription from U6 termination sequence.
²The RTT pairing NO column indicates the RTTs as indicated in Table 56. For example, “RTT pairing NO n” means the 5′ RTT is RTT1 as provided in Table 56, and the 3′ RTT is RTT2 as provided in Table 56 of RTT paring n, and “RTT pairing NO n#” means the 5′ RTT is RTT2 as provided in Table 56, and the 3′ RTT is RTT1 as provided in Table 56 of RTT paring NO n.
³−: 0 to 0.063%; +: 0.063% to 4.65%; ++: 4.65% to 9.24%; +++: 9.24% to 13.82%; ++++: 13.82% to 18.41%

[0919] Successful dual prime editing was observed in cells edited with PEgRNA pairs having a pair of complementary RTTs with varying GC % and lengths of the complementarity region. In addition, 5′ PEgRNAs of SEQ ID NOs: 64, 164, and 297 have the same spacer (SEQ ID NOs: 1, 101, 234, respectively) and PBS sequences (SEQ ID NOs: 12, 112, 245, respectively) as SEQ ID NOs: 22, 122, and 255, respectively, although SEQ ID NOs: 64, 164, and 297 contain RTT SEQ ID NO: 2071 (RTT2 of RTT pairing NO 1 as provided in Table 56) and SEQ ID NOs: 22, 122, and 255 contain RTT SEQ ID NO: 1972 (RTT1 of RTT pairing NO 1 as provided in Table 56). 3′ PEgRNAs of SEQ ID NOs: 694, 1080, and 1278 have the same spacer (SEQ ID NOs: 631, 1017, and 1215, respectively) and PBS sequence (SEQ ID NOs: 642, 1028, and 1226, respectively) as SEQ ID NOs: 654, 1040, and 1238, respectively, although SEQ ID NOs: 694, 1080, and 1278 contain RTT SEQ ID NO: 1972 (RTT1 of RTT pairing NO 1 as provided in Table 56) and SEQ ID NOs: 654, 1040, and 1238 contain RTT SEQ ID NO: 2071 (RTT2 of RTT pairing NO 1 as provided in Table 56). Successful prime editing with PEgRNA pairs having the 5′ RTT of SEQ ID NO: 1972 and 3′ RTT of SEQ ID NO: 2071 as well as with PEgRNA pairs having the 5′ RTT of SEQ ID NO: 2071 and 3′ RTT of SEQ ID NO: 1972 was observed in this Example and in Example 2. The results indicate that each of the two complementary sequences can both be used as either a 5′ RTT or a 3′ RTT for dual prime editing regardless of the orientation of the complementary region (the OD) between the RTT pair.

### Example 5—Dual Prime Editing for Excision of GAA Repeats in FXN Gene in Wild-Type HEK293T Cells

[0920] PEgRNA pairs were designed to remove the GAA repeats in the FXN gene without insertion of an exogenous sequence. PEgRNAs were assembled, wild type HEK293T cells were transfected, and genomic DNA harvested for ddPCR sequencing and analysis as described in Example 1. The number of sequencing reads harboring the intended edit is determined using a FAM primer set that targets the FXN sequences directly upstream/downstream of the nicks. FAM/HEX ratio was used as a proxy to estimate editing efficiency. Three replicates of negative controls were included, where HEK293T cells were cultured and plated in the same way as the edited cells but not contacted with polynucleotides encoding the prime editor or PEgRNA.

[0921] The SEQ ID NOs for the PEgRNAs, components, and editing efficiency results are provided in Tables 72A and 72B. RTTs that have 20, 25, or 30 nt complementarity to the endogenous FXN sequence downstream of the opposite end nick site (i.e., outside the IND) were tested; the RTT SEQ ID NO, RTT sequences, and the length and GC % of the complementarity region to endogenous FXN sequence are provided in Tables 57A and 57B. Table 72A shows dual prime deletion efficiency with a 5′ PEgRNA having a spacer of SEQ ID NO: 101 and PBS sequence of SEQ ID NO: 115. Table 72B shows dual prime deletion editing efficiency results with a 5′ PEgRNA having a spacer of SEQ ID NO: 101 and PBS sequence of SEQ ID NO: 113.

TABLE 72A
Dual prime editing deletion with 5′ PEgRNA having
a spacer of SEQ ID NO: 101 and PBS sequence of SEQ ID NO: 115

| 5′ PERNA | | 3′ PEgRNA | | | | |
|---|---|---|---|---|---|---|
| SEQ ID | 5′ RTT SEQ | SEQ ID | 3′ spacer | 3′ RTT SEQ | 3′ PBS SEQ | |
| NO¹ | ID NO | NO¹ | SEQ ID NO | ID NO | ID NO | % Editing² |
| 168 | 2170 | 698 | 631 | 2179 | 645 | + |
| 172 | 2171 | 698 | 631 | 2179 | 645 | + |
| 176 | 2172 | 698 | 631 | 2179 | 645 | + |
| 180 | 2173 | 1084 | 1017 | 2179 | 1031 | ++++ |
| 184 | 2174 | 1084 | 1017 | 2179 | 1031 | − |
| 188 | 2175 | 1084 | 1017 | 2179 | 1031 | ++ |
| 192 | 2176 | 1282 | 1215 | 2179 | 1229 | − |
| 196 | 2177 | 1282 | 1215 | 2179 | 1229 | − |
| 200 | 2178 | 1282 | 1215 | 2179 | 1229 | − |
| 168 | 2170 | 702 | 631 | 2180 | 645 | + |
| 172 | 2171 | 702 | 631 | 2180 | 645 | + |
| 176 | 2172 | 702 | 631 | 2180 | 645 | − |
| 180 | 2173 | 1088 | 1017 | 2180 | 1031 | − |
| 184 | 2174 | 1088 | 1017 | 2180 | 1031 | − |
| 188 | 2175 | 1088 | 1017 | 2180 | 1031 | − |
| 192 | 2176 | 1286 | 1215 | 2180 | 1229 | − |
| 196 | 2177 | 1286 | 1215 | 2180 | 1229 | − |
| 200 | 2178 | 1286 | 1215 | 2180 | 1229 | + |
| 168 | 2170 | 706 | 631 | 2181 | 645 | + |
| 172 | 2171 | 706 | 631 | 2181 | 645 | + |
| 176 | 2172 | 706 | 631 | 2181 | 645 | − |
| 180 | 2173 | 1092 | 1017 | 2181 | 1031 | − |
| 184 | 2174 | 1092 | 1017 | 2181 | 1031 | − |
| 188 | 2175 | 1092 | 1017 | 2181 | 1031 | + |
| 192 | 2176 | 1290 | 1215 | 2181 | 1229 | + |
| 196 | 2177 | 1290 | 1215 | 2181 | 1229 | ++++ |
| 200 | 2178 | 1290 | 1215 | 2181 | 1229 | + |
| NTC | NTC | NTC | NTC | NTC | NTC | − |

¹The PEgRNA sequences used experimentally further contained transcription adaptations for a U6 expression construct, i.e., addition of a 5′ G if the first nucleotide is not a G, addition of 1-7 Us from the U6 transcription termination sequence, e.g., 4 additional Us as a result of transcription from U6 termination sequence.
²−: 0; +: 0 to 1.13%; ++: 1.13 to 2.26%; +++: 2.26% to 3.39%; ++++: 3.39% to 4.51%

TABLE 72B
Dual prime editing deletion with 5′ PEgRNA having
a spacer of SEQ ID NO: 101 and PBS sequence of SEQ ID NO: 113

| 5′ PEgRNA | | 3′ PEgRNA | | | | |
|---|---|---|---|---|---|---|
| SEQ ID | 5′ RTT SEQ | SEQ ID | 3′ spacer | 3′ RTT SEQ | 3′ PBS SEQ | |
| NO¹ | ID NO | NO¹ | SEQ ID NO | ID NO | ID NO | % Editing² |
| 166 | 2170 | 696 | 631 | 2179 | 643 | + |
| 170 | 2171 | 696 | 631 | 2179 | 643 | +++ |
| 174 | 2172 | 696 | 631 | 2179 | 643 | + |
| 178 | 2173 | 1082 | 1017 | 2179 | 1029 | ++ |
| 182 | 2174 | 1082 | 1017 | 2179 | 1029 | + |
| 186 | 2175 | 1082 | 1017 | 2179 | 1029 | − |
| 190 | 2176 | 1280 | 1215 | 2179 | 1227 | − |
| 194 | 2177 | 1280 | 1215 | 2179 | 1227 | − |
| 198 | 2178 | 1280 | 1215 | 2179 | 1227 | +++ |
| 166 | 2170 | 700 | 631 | 2180 | 643 | − |
| 170 | 2171 | 700 | 631 | 2180 | 643 | + |
| 174 | 2172 | 700 | 631 | 2180 | 643 | ++ |
| 178 | 2173 | 1086 | 1017 | 2180 | 1029 | ++ |
| 182 | 2174 | 1086 | 1017 | 2180 | 1029 | ++ |
| 186 | 2175 | 1086 | 1017 | 2180 | 1029 | − |
| 190 | 2176 | 1284 | 1215 | 2180 | 1227 | + |
| 194 | 2177 | 1284 | 1215 | 2180 | 1227 | + |
| 198 | 2178 | 1284 | 1215 | 2180 | 1227 | NA |
| 166 | 2170 | 704 | 631 | 2181 | 643 | + |
| 170 | 2171 | 704 | 631 | 2181 | 643 | +++ |
| 174 | 2172 | 704 | 631 | 2181 | 643 | ++++ |
| 178 | 2173 | 1090 | 1017 | 2181 | 1029 | + |
| 182 | 2174 | 1090 | 1017 | 2181 | 1029 | +++ |
| 186 | 2175 | 1090 | 1017 | 2181 | 1029 | + |
| 190 | 2176 | 1288 | 1215 | 2181 | 1227 | ++ |
| 194 | 2177 | 1288 | 1215 | 2181 | 1227 | − |
| 198 | 2178 | 1288 | 1215 | 2181 | 1227 | + |
| NTC | NTC | NTC | NTC | NTC | NTC | − |

¹The PEgRNA sequences used experimentally further contained transcription adaptations for a U6 expression construct, i.e., addition of a 5′ G if the first nucleotide is not a G, addition of 1-7 Us from the U6 transcription termination sequence, e.g., 4 additional Us as a result of transcription from U6 termination sequence.
²−: 0; +: 0 to 1.13%; ++: 1.13 to 2.26%; +++: 2.26% to 3.39%; ++++: 3.39% to 4.51%

### Example 6—Dual Prime Editing for Excision of GAA Repeats in FXN Gene in Wild-Type HEK 293T Cells

[0922] Ninety PEgRNA pairs were tested for removing the GAA repeats in the FXN gene in wild type HEK293T cells. In this experiment, the 5′ PEgRNAs each had a spacer having the sequence of SEQ ID NOs: 1, 101, or 234, and the 3′ PEgRNAs each had a spacer having the sequence of SEQ ID NOs: 631, 1017, or 1215. For each spacer pair, one pair of PEgRNAs have a gRNA core having the canonical SpCas9 guide RNA scaffold sequence (SEQ ID NO: 2260) and no additional motif at the 3′ end of the PBS. The other PEgRNA pairs have an alternative gRNA core (SEQ ID NOs: 2259, 2261, 2262, 2263, 2264, 2265, or 2266, as specified in Table 73 below, and/or have a 3′ motif having the sequence of CGCGGTTCTATCTAGTTACGCGTTAAACCAACTAGAA (SEQ ID NO: 2237), which is connected to the 3′ end of the PBS via a linker. 5′ PEgRNAs of SEQ ID NOs: 68, 83, 85, 87, 89, 91, 93, and 95 have a spacer having the sequence of SEQ ID NO: 1 and a 9 nt PBS having the sequence of SEQ ID NO: 11. 5′ PEgRNAs of SEQ ID NOs: 124, 218, 220, 222, 224, 226, 228, and 230 have a spacer having the sequence of SEQ ID NO: 101 and a 12 nt PBS having the sequence of SEQ ID NO: 114. 5′ PEgRNAs of SEQ ID NOs: 255, 315, 317, 319, 321, 323, 325, and 327 have a spacer having the sequence of SEQ ID NO: 234 and a 10 nt PBS having the sequence of SEQ ID NO: 245. 3′ PEgRNAs of SEQ ID NOs: 654, 724, 726, 728, 730, 732, 734, and 736 have a spacer having the sequence of SEQ ID NO: 631 and a 10 nt PBS having the sequence of SEQ ID NO: 642. 3′ PEgRNAs of SEQ ID NOs: 1099, 1112, 1114, 1116, 1118, 1120, 1122, and 1124 have a spacer having the sequence of SEQ ID NO: 1017 and a 11 nt PBS having the sequence of SEQ ID NO: 1029. 3′ PEgRNAs of SEQ ID NOs: 1236, 1308, 1310, 1312, 1314, 1316, 1318, and 1320 have a spacer having the sequence of SEQ ID NO: 1215 and a 12 nt PBS having the sequence of SEQ ID NO: 1228. All 5′ PEgRNAs have an RTT of SEQ ID NO: 1972, and all 3′ PEgRNAs have an RTT of SEQ ID NO: 2071. Sequences for the PEgRNAs (tables 1-55), linkers (table 58), gRNA cores (table 59), and the 3′ motif of each of the PEgRNAs are provided in their respective tables above.

[0923] PEgRNAs were assembled, wild type HEK293T cells were transfected, and genomic DNA harvested for ddPCR sequencing and analysis as described in Example 1. No-treatment controls (NTCs) were included, where HEK293T cells were cultured and plated in the same way as the edited cells but not contacted with polynucleotides encoding the prime editor or PEgRNA.

[0924] The PEgRNA SEQ ID NOs and editing results are provided in Table 73. Dual prime editing was observed with all PEgRNA pairs tested, including PEgRNAs having the canonical SpCas9 scaffold and the modified scaffolds. The addition of the additional 3′ motif (SEQ ID NO: 2237) generally increased editing efficiency.

TABLE 73
Dual prime editing for excision of GAA repeats in wild type HEK293T cells

| | | 5′ | 5′ | | | 3′ | 3′ | |
|---|---|---|---|---|---|---|---|---|
| | 5′ | PEgRNA | PEgRNA | | 3′ | PERNA | PEgRNA | |
| 5′ | PEgRNA | 3′ end | 3′ end | 3′ | PEgRNA | 3′ end | 3′ end | |
| PEgRNA | scaffold | linker | Motif | PEgRNA | scaffold | linker | Motif | |
| SEQ ID | SEQ ID | SEQ ID | SEQ ID | SEQ ID | SEQ ID | SEQ ID | SEQ ID | FAM/HEX |
| NO¹ | NO | NO | NO | NO¹ | NO | NO | NO | ratio² |
| 68 | 2260 | none | none | 654 | 2260 | none | none | ++ |
| 83 | 2259 | none | none | 724 | 2259 | none | none | ++ |
| 85 | 2260 | 2238 | 2237 | 726 | 2260 | 2256 | 2237 | +++ |
| 87 | 2260 | 2252 | 2237 | 728 | 2260 | 2258 | 2237 | ++++ |
| 89 | 2259 | 2240 | 2237 | 730 | 2259 | 2256 | 2237 | ++++ |
| 91 | 2259 | 2242 | 2237 | 732 | 2259 | 2258 | 2237 | ++++ |
| 93 | 2261 | none | none | 734 | 2267 | none | none | +++ |
| 95 | 2262 | none | none | 734 | 2267 | none | none | +++ |
| 93 | 2261 | none | none | 736 | 2268 | none | none | +++ |
| 95 | 2262 | none | none | 736 | 2268 | none | none | +++ |
| 68 | 2260 | none | none | 1099 | 2260 | none | none | +++ |
| 83 | 2259 | none | none | 1112 | 2259 | none | none | +++ |
| 85 | 2260 | 2238 | 2237 | 1114 | 2260 | 2249 | 2237 | ++++ |
| 87 | 2260 | 2252 | 2237 | 1116 | 2260 | 2255 | 2237 | ++++ |
| 89 | 2259 | 2240 | 2237 | 1118 | 2259 | 2254 | 2237 | ++++ |
| 91 | 2259 | 2242 | 2237 | 1120 | 2259 | 2239 | 2237 | ++++ |
| 93 | 2261 | none | none | 1122 | 2267 | none | none | +++ |
| 95 | 2262 | none | none | 1122 | 2267 | none | none | +++ |
| 93 | 2261 | none | none | 1124 | 2269 | none | none | +++ |
| 95 | 2262 | none | none | 1124 | 2269 | none | none | +++ |
| 68 | 2260 | none | none | 1236 | 2260 | none | none | +++ |
| 83 | 2259 | none | none | 1308 | 2259 | none | none | +++ |
| 85 | 2260 | 2238 | 2237 | 1310 | 2260 | 2251 | 2237 | ++++ |
| 87 | 2260 | 2252 | 2237 | 1312 | 2260 | 2244 | 2237 | ++++ |
| 89 | 2259 | 2240 | 2237 | 1314 | 2259 | 2253 | 2237 | ++++ |
| 91 | 2259 | 2242 | 2237 | 1316 | 2259 | 2246 | 2237 | ++++ |
| 93 | 2261 | none | none | 1318 | 2267 | none | none | ++ |
| 95 | 2262 | none | none | 1318 | 2267 | none | none | +++ |
| 93 | 2261 | none | none | 1320 | 2270 | none | none | ++ |
| 95 | 2262 | none | none | 1320 | 2270 | none | none | ++ |
| 124 | 2260 | none | none | 654 | 2260 | none | none | ++ |
| 218 | 2259 | none | none | 724 | 2259 | none | none | ++ |
| 220 | 2260 | 2243 | 2237 | 726 | 2260 | 2256 | 2237 | ++++ |
| 222 | 2260 | 2250 | 2237 | 728 | 2260 | 2258 | 2237 | ++++ |
| 224 | 2259 | 2243 | 2237 | 730 | 2259 | 2256 | 2237 | ++++ |
| 226 | 2259 | 2245 | 2237 | 732 | 2259 | 2258 | 2237 | ++++ |
| 228 | 2263 | none | none | 734 | 2267 | none | none | ++ |
| 230 | 2264 | none | none | 734 | 2267 | none | none | ++ |
| 228 | 2263 | none | none | 736 | 2268 | none | none | ++ |
| 230 | 2264 | none | none | 736 | 2268 | none | none | ++ |
| 124 | 2260 | none | none | 1099 | 2260 | none | none | +++ |
| 218 | 2259 | none | none | 1112 | 2259 | none | none | +++ |
| 220 | 2260 | 2243 | 2237 | 1114 | 2260 | 2249 | 2237 | +++ |
| 222 | 2260 | 2250 | 2237 | 1116 | 2260 | 2255 | 2237 | +++ |
| 224 | 2259 | 2243 | 2237 | 1118 | 2259 | 2254 | 2237 | ++++ |
| 226 | 2259 | 2245 | 2237 | 1120 | 2259 | 2239 | 2237 | ++++ |
| 228 | 2263 | none | none | 1122 | 2267 | none | none | ++ |
| 230 | 2264 | none | none | 1122 | 2267 | none | none | ++ |
| 228 | 2263 | none | none | 1124 | 2269 | none | none | +++ |
| 230 | 2264 | none | none | 1124 | 2269 | none | none | ++ |
| 124 | 2260 | none | none | 1236 | 2260 | none | none | ++ |
| 218 | 2259 | none | none | 1308 | 2259 | none | none | ++ |
| 220 | 2260 | 2243 | 2237 | 1310 | 2260 | 2251 | 2237 | +++ |
| 222 | 2260 | 2250 | 2237 | 1312 | 2260 | 2244 | 2237 | +++ |
| 224 | 2259 | 2243 | 2237 | 1314 | 2259 | 2253 | 2237 | +++ |
| 226 | 2259 | 2245 | 2237 | 1316 | 2259 | 2246 | 2237 | +++ |
| 228 | 2263 | none | none | 1318 | 2267 | none | none | ++ |
| 230 | 2264 | none | none | 1318 | 2267 | none | none | + |
| 228 | 2263 | none | none | 1320 | 2270 | none | none | ++ |
| 230 | 2264 | none | none | 1320 | 2270 | none | none | ++ |
| 255 | 2260 | none | none | 654 | 2260 | none | none | ++ |
| 315 | 2259 | none | none | 724 | 2259 | none | none | +++ |
| 317 | 2260 | 2257 | 2237 | 726 | 2260 | 2256 | 2237 | +++ |
| 319 | 2260 | 2247 | 2237 | 728 | 2260 | 2258 | 2237 | +++ |
| 321 | 2259 | 2241 | 2237 | 730 | 2259 | 2256 | 2237 | ++++ |
| 323 | 2259 | 2248 | 2237 | 732 | 2259 | 2258 | 2237 | +++ |
| 325 | 2265 | none | none | 734 | 2267 | none | none | ++ |
| 327 | 2266 | none | none | 734 | 2267 | none | none | ++ |
| 325 | 2265 | none | none | 736 | 2268 | none | none | ++ |
| 327 | 2266 | none | none | 736 | 2268 | none | none | ++ |
| 255 | 2260 | none | none | 1099 | 2260 | none | none | +++ |
| 315 | 2259 | none | none | 1112 | 2259 | none | none | +++ |
| 317 | 2260 | 2257 | 2237 | 1114 | 2260 | 2249 | 2237 | +++ |
| 319 | 2260 | 2247 | 2237 | 1116 | 2260 | 2255 | 2237 | +++ |
| 321 | 2259 | 2241 | 2237 | 1118 | 2259 | 2254 | 2237 | +++ |
| 323 | 2259 | 2248 | 2237 | 1120 | 2259 | 2239 | 2237 | +++ |
| 325 | 2265 | none | none | 1122 | 2267 | none | none | ++ |
| 327 | 2266 | none | none | 1122 | 2267 | none | none | ++ |
| 325 | 2265 | none | none | 1124 | 2269 | none | none | ++ |
| 327 | 2266 | none | none | 1124 | 2269 | none | none | ++ |
| 255 | 2260 | none | none | 1236 | 2260 | none | none | +++ |
| 315 | 2259 | none | none | 1308 | 2259 | none | none | +++ |
| 317 | 2260 | 2257 | 2237 | 1310 | 2260 | 2251 | 2237 | +++ |
| 319 | 2260 | 2247 | 2237 | 1312 | 2260 | 2244 | 2237 | +++ |
| 321 | 2259 | 2241 | 2237 | 1314 | 2259 | 2253 | 2237 | +++ |
| 323 | 2259 | 2248 | 2237 | 1316 | 2259 | 2246 | 2237 | +++ |
| 325 | 2265 | none | none | 1318 | 2267 | none | none | ++ |
| 327 | 2266 | none | none | 1318 | 2267 | none | none | ++ |
| 325 | 2265 | none | none | 1320 | 2270 | none | none | ++ |
| 327 | 2266 | none | none | 1320 | 2270 | none | none | ++ |
| NTC | NTC | NTC | NTC | NTC | NTC | NTC | NTC | − |
| NTC | NTC | NTC | NTC | NTC | NTC | NTC | NTC | − |
| NTC | NTC | NTC | NTC | NTC | NTC | NTC | NTC | − |
| NTC | NTC | NTC | NTC | NTC | NTC | NTC | NTC | − |
| NTC | NTC | NTC | NTC | NTC | NTC | NTC | NTC | − |
| NTC | NTC | NTC | NTC | NTC | NTC | NTC | NTC | − |

¹The PEgRNA sequences used experimentally further contained transcription adaptations for a U6 expression construct, i.e., addition of a 5′ G if the first nucleotide is not a G, addition of 1-7 Us from the U6 transcription termination sequence, e.g., 4 additional Us as a result of transcription from U6 termination sequence.
²−: 0 to 0.039%; +: 0.039% to 8.77%; ++: 8.77% to 17.49%; +++: 17.49% to 26.22%; ++++: 26.22% to 34.94%.

### Example 7—Dual Prime Editing for Excision of GAA Repeats in the FXN Gene in Patient Derived iPSCs

[0925] Three iPSC cell lines were obtained from two Friedreich's Ataxia patients as well as a healthy donor, of which patient iPSC line #1 harbors 541 and 420 GAA repeats, and patient iPSC line #2 harbors 380 and 330 GAA repeats in the FXN gene. PEgRNAs were assembled as described in Example 2. The iPSC lines were transfected with PEgRNA pairs and polynucleotide encoding the prime editor fusion protein, and genomic DNA was harvested for ddPCR analysis as described in Example 1. The amount of edited FXN alleles was determined by a FAM primer set which includes a specific reverse primer targeting the attB sequence. The amount of total FXN alleles was determined by a HEX primer set which targets the intron 4 of FXN.

[0926] PEgRNA pairs having certain spacers tested in Examples 2 and 3 were examined for excision of GAA repeats in the FXN gene in iPSCs. Each experiment included one or more no-treatment controls (NTCs) as indicated in the sequence and data tables below, where iPSC cells were cultured and plated in the same way as the edited cells but not contacted with polynucleotides encoding the prime editor or PEgRNA.

[0927] First, PEgRNA pairs having a 5′ spacer of SEQ ID NOs: 1, 101, or 234 and a 3′ spacer of SEQ ID NOs: 631, 1017, and 1215 were examined in both patient iPSC lines and also in healthy iPSCs. All 5′ PEgRNAs have an RTT of SEQ ID NO: 1972, and all 3′ PEgRNAs have an RTT of SEQ ID NO: 2071. The PEgRNA SEQ ID Nos and editing results are shown in Table 74.

TABLE 74
Dual Prime editing efficiency in iPSCs with select PEgRNA pairs and their components

| 5′ | 5′ | | | | | | | ²Editing | ²Editing | ²Editing |
|---|---|---|---|---|---|---|---|---|---|---|
| PEgRNA | spacer | 5′ PBS | | 3′ | 3′ | | | % in | % in | % in |
| SED ID | SEQ ID | SEQ | 5′ PBS | PEgRNA | spacer | 3′ PBS | 3′ PBS | FRDA | FRDA | healthy |
| NO¹ | NO | ID NO | length | SED ID¹ | SEQ ID | SEQ ID | length | iPSC#1 | iPSC#2 | iPSC |
| 257 | 234 | 247 | 12 | 652 | 631 | 644 | 12 | +++ | +++ | ++++ |
| 257 | 234 | 247 | 12 | 1038* | 1017 | 1030 | 12 | +++ | +++ | ++++ |
| 257 | 234 | 247 | 12 | 1238 | 1215 | 1226 | 10 | ++++ | +++ | ++++ |
| 124 | 101 | 114 | 12 | 652 | 631 | 644 | 12 | ++++ | +++ | ++++ |
| 124 | 101 | 114 | 12 | 1038* | 1017 | 1030 | 12 | ++++ | +++ | ++++ |
| 124 | 101 | 114 | 12 | 1238 | 1215 | 1226 | 10 | ++++ | ++++ | ++++ |
| 24* | 1 | 14 | 12 | 652 | 631 | 644 | 12 | +++ | +++ | ++++ |
| 24* | 1 | 14 | 12 | 1038* | 1017 | 1030 | 12 | ++++ | +++ | ++++ |
| 24* | 1 | 14 | 12 | 1238 | 1215 | 1226 | 10 | ++++ | +++ | ++++ |

¹The PEgRNA sequences used experimentally further contained transcription adaptations for a U6 expression construct, i.e., addition of a 5′ G if the first nucleotide is not a G, addition of 1-7 Us from the U6 transcription termination sequence, e.g., 4 additional Us as a result of transcription from U6 termination sequence. The PEgRNA sequences used experimentally for SEQ ID NOs annotated with an aster “*” further containedan additional A between 3′ end of the PBS and the U6 termination sequence.
²Editing efficiency between 0% to 15% are indicated with “+”, PEgRNA pairs exhibiting editing efficiency of 15% to 25% are indicated with “++”, and PEgRNA pairs exhibiting editing efficiency of 25% to 40% are indicated with “+++”, and PEgRNA pairs exhibiting editing efficiency of 40% to 100% are indicated with “++++”.

[0928] At least 25% of editing efficiency was observed for each PEgRNA pair, including PEgRNAs having PBS length of both 10 nt and 12 nt.

[0929] A broader editing experiment was performed to examine additional PEgRNA pairs having different spacers and/or PBS lengths. All 5′ PEgRNAs have an RTT of SEQ ID NO: 1972, and all 3′ PEgRNAs have an RTT of SEQ ID NO: 2071. Dual prime editing efficiency was tested in patient iPSC line #1. The PEgRNA sequences and editing results are shown in Tables 75A, B, and C below. For data in Table 75A, the following ranges were used to group editing efficiency. −: 0 to 0.79%; +: 0.79% to 14.10%; ++: 14.10% to 27.41%; +++: 27.41% to 40.73%; ++++: 40.73% to 54.04%. For each PEgRNA pair, editing efficiency (%) is provided in a cell of Table 75A where the 5′ PEgRNA SEQ ID NO and the 3′ PEgRNA SEQ ID NO intersect.

TABLE 75A
Dual prime editing efficiency of PEgRNA pairs tested in iPSC lines

| 3′ PEgRNA | 5′ PEgRNA SEQ ID No¹ | | | | | | | | | | | | | | | |
|---|---|---|---|---|---|---|---|---|---|---|---|---|---|---|---|---|
| SEQ ID NO¹ | 22 | 24* | 122 | 124 | 255 | 257 | 352 | 354 | 383 | 385 | 412* | 414 | 443 | 445 | 472 | 474* |
| 503 | + | − | − | + | − | + | − | − | + | − | + | − | + | + | − | − |
| 505 | + | + | − | − | − | − | − | − | − | − | + | + | + | + | + | − |
| 532 | + | NA | + | − | + | + | + | + | + | + | + | + | + | + | + | + |
| 534* | + | ++ | − | + | + | + | + | + | − | + | + | + | + | + | + | − |
| 563 | + | − | + | + | − | − | − | − | + | + | + | + | + | + | + | + |
| 565 | − | − | + | + | + | + | + | − | + | + | − | + | + | − | + | + |
| 592 | + | + | + | + | + | + | + | − | − | + | − | + | + | − | + | + |
| 594 | + | + | + | + | − | + | + | + | + | + | + | + | + | + | + | + |
| 621 | + | − | + | + | + | + | + | + | + | + | + | + | + | + | + | + |
| 623* | + | + | − | + | + | + | − | + | + | + | + | + | + | + | − | + |
| 652 | +++ | +++ | + | ++ | + | + | + | + | + | + | ++ | + | + | + | + | + |
| 654 | ++ | ++ | ++ | ++ | ++ | ++ | + | + | + | + | ++ | ++ | + | + | + | + |
| 761 | ++ | ++ | + | + | + | + | − | + | + | + | ++ | + | + | + | + | + |
| 763 | ++ | − | + | + | + | + | − | − | + | − | + | + | + | + | + | + |
| 788* | +++ | ++ | +++ | ++ | ++ | ++ | − | + | + | + | ++ | ++ | + | + | − | − |
| 790 | ++ | − | + | + | + | + | − | − | + | − | + | + | + | + | + | + |
| 817 | + | + | + | + | + | + | − | − | − | − | + | + | + | − | − | + |
| 819 | + | + | + | + | + | + | + | + | + | − | + | + | + | + | + | + |
| 844 | − | − | + | + | + | + | − | + | − | + | + | + | + | + | + | + |
| 846* | + | ++ | + | + | + | + | + | + | + | + | + | + | ++ | + | − | + |
| 873* | ++ | ++ | ++ | +++ | ++ | ++ | + | + | + | + | ++ | + | + | + | + | + |
| 875 | +++ | ++ | ++ | +++ | ++ | ++ | + | + | + | + | ++ | + | + | + | − | − |
| 902* | + | NA | ++ | ++ | + | − | + | + | + | + | ++ | + | + | − | + | + |
| 904 | +++ | ++ | ++ | ++ | ++ | ++ | + | + | + | − | + | + | + | + | + | − |
| 931 | + | NA | + | − | − | − | − | NA | − | + | + | − | + | − | − | − |
| 933 | + | − | + | + | + | + | − | − | − | + | − | + | + | + | + | + |
| 958* | NA | NA | + | + | + | + | NA | NA | NA | NA | NA | NA | NA | NA | NA | NA |
| 960 | + | + | + | + | + | + | − | + | − | − | + | + | + | + | − | − |
| 984 | ++ | ++ | + | + | + | + | + | NA | + | + | + | + | + | − | − | − |
| 986 | +++ | − | ++ | ++ | ++ | ++ | + | + | − | + | + | + | + | + | + | + |
| 1011 | + | + | + | + | ++ | + | + | + | − | + | + | + | + | + | − | − |
| 1013 | ++ | ++ | ++ | ++ | ++ | + | − | − | − | + | ++ | + | + | + | + | + |
| 1038* | +++ | ++ | − | ++++ | ++++ | ++++ | + | + | + | − | +++ | ++ | + | − | + | + |
| 1040* | ++ | +++ | ++ | +++ | ++ | ++ | + | + | + | + | ++ | + | + | + | + | + |
| 1153 | ++ | NA | + | + | + | + | NA | NA | + | + | + | + | + | + | + | − |
| 1155 | +++ | +++ | ++ | ++ | + | + | + | + | + | + | + | + | + | − | − | − |
| 1180 | + | + | + | + | + | + | + | NA | + | + | + | + | + | − | + | − |
| 1182 | ++ | + | + | + | + | + | + | + | + | + | + | + | + | + | − | − |
| 1207 | +++ | ++++ | ++ | + | +++ | + | + | + | − | − | + | + | + | − | − | + |
| 1209* | +++ | +++ | ++ | ++ | ++ | + | + | + | + | + | ++ | + | + | + | − | − |
| 1236 | +++ | ++ | ++ | +++ | ++ | ++ | + | + | + | + | ++ | + | ++ | + | − | + |
| 1238 | +++ | ++++ | ++ | +++ | ++ | + | + | + | − | + | ++ | + | + | + | − | − |
| 1345 | + | − | + | + | + | + | + | + | + | + | + | + | + | + | − | + |
| 1347 | + | + | + | + | + | + | + | − | − | + | + | + | + | − | − | + |
| 1372 | + | − | + | + | + | + | + | − | + | + | + | + | + | + | − | + |
| 1374* | + | + | + | + | + | + | + | − | + | + | + | + | + | + | + | − |

¹The PEgRNA sequences used experimentally further contained transcription adaptations for a U6 expression construct, i.e., addition of a 5′ G if the first nucleotide is not a G, addition of 1-7 Us from the U6 transcription termination sequence, e.g., 4 additional Us as a result of transcription from U6 termination sequence. The PEgRNA sequences used experimentally for SEQ ID NOs annotated with an aster “*” further containedan additional A between 3′ end of the PBS and the U6 termination sequence.

TABLE 75B
SEQ ID NOs of 5′ PEgRNA and components
used in screening editing efficiency

| 5′ PEgRNA | 5′ spacer | 5′ PBS SEQ | 5′ PBS |
|---|---|---|---|
| SEQ ID NO | SEQ ID NO | ID NO | length |
| 22 | 1 | 12 | 10 |
| 24 | 1 | 14 | 12 |
| 122 | 101 | 112 | 10 |
| 124 | 101 | 114 | 12 |
| 255 | 234 | 245 | 10 |
| 257 | 234 | 247 | 12 |
| 352 | 331 | 343 | 11 |
| 354 | 331 | 345 | 13 |
| 383 | 362 | 373 | 10 |
| 385 | 362 | 375 | 12 |
| 412 | 391 | 402 | 10 |
| 414 | 391 | 405 | 13 |
| 443 | 422 | 433 | 10 |
| 445 | 422 | 435 | 12 |
| 472 | 451 | 462 | 10 |
| 474 | 451 | 464 | 12 |

TABLE 75C
SEQ ID NOs of 3′ PEgRNA and components
used for screening editing efficiency

| 3′ PEgRNA | 3′ spacer | 3′ PBS SEQ | 3′ PBS |
|---|---|---|---|
| SEQ ID NO | SEQ ID NO | ID NO | length |
| 503 | 482 | 493 | 10 |
| 505 | 482 | 495 | 12 |
| 532 | 511 | 522 | 10 |
| 534 | 511 | 524 | 12 |
| 563 | 542 | 553 | 10 |
| 565 | 542 | 555 | 12 |
| 592 | 571 | 582 | 10 |
| 594 | 571 | 584 | 12 |
| 621 | 600 | 611 | 10 |
| 623 | 600 | 613 | 12 |
| 652 | 631 | 644 | 12 |
| 654 | 631 | 642 | 10 |
| 761 | 740 | 753 | 12 |
| 763 | 740 | 751 | 10 |
| 788 | 767 | 780 | 12 |
| 790 | 767 | 778 | 10 |
| 817 | 796 | 809 | 12 |
| 819 | 796 | 807 | 10 |
| 844 | 823 | 836 | 12 |
| 846 | 823 | 834 | 10 |
| 873 | 852 | 865 | 12 |
| 875 | 852 | 863 | 10 |
| 902 | 881 | 894 | 12 |
| 904 | 881 | 892 | 10 |
| 931 | 910 | 923 | 12 |
| 933 | 910 | 921 | 10 |
| 958 | 937 | 950 | 12 |
| 960 | 937 | 949 | 11 |
| 984 | 966 | 976 | 12 |
| 986 | 966 | 974 | 10 |
| 1011 | 990 | 1003 | 12 |
| 1013 | 990 | 1001 | 10 |
| 1038 | 1017 | 1030 | 12 |
| 1040 | 1017 | 1028 | 10 |
| 1153 | 1132 | 1145 | 12 |
| 1155 | 1132 | 1143 | 10 |
| 1180 | 1159 | 1172 | 12 |
| 1182 | 1159 | 1170 | 10 |
| 1207 | 1186 | 1199 | 12 |
| 1209 | 1186 | 1197 | 10 |
| 1236 | 1215 | 1228 | 12 |
| 1238 | 1215 | 1226 | 10 |
| 1345 | 1324 | 1337 | 12 |
| 1347 | 1324 | 1335 | 10 |
| 1372 | 1351 | 1364 | 12 |
| 1374 | 1351 | 1362 | 10 |

[0930] Separately, the PEgRNA pairs tested in Example 3 were also examined for dual prime editing in patient iPSC line #1. The 5′ PEgRNA has the sequence of SEQ ID NO: 124, which has a spacer having the sequence of SEQ ID NO: 101 and a 12-nt PBS having the sequence of SEQ ID NO: 114. The 3′ PEgRNA sequences and editing results are provided in Table 76 below.

TABLE 76
Dual Prime editing efficiency in patient iPSC line
#1 with 5′ PEgRNA¹ SEQ ID NO: 124

| 3′ PEgRNA | 3′ spacer | 3′ PBS SEQ | | |
|---|---|---|---|---|
| SEQ ID NO¹ | SEQ ID NO | ID NO | 3′ PBS length | % Editing |
| 1401 | 1380 | 1393 | 12 | + |
| 1403 | 1380 | 1391 | 10 | + |
| 1426 | 1405 | 1418 | 12 | +++ |
| 1428 | 1405 | 1416 | 10 | ++++ |
| 1451 | 1430 | 1443 | 12 | − |
| 1453 | 1430 | 1441 | 10 | − |
| 1476 | 1455 | 1468 | 12 | − |
| 1478 | 1455 | 1466 | 10 | − |
| 1501 | 1480 | 1493 | 12 | + |
| 1503 | 1480 | 1491 | 10 | + |
| 1524 | 1505 | 1516 | 12 | + |
| 1526 | 1505 | 1514 | 10 | + |
| 1549 | 1528 | 1541 | 12 | + |
| 1551 | 1528 | 1539 | 10 | − |
| 1574 | 1553 | 1566 | 12 | ++ |
| 1576 | 1553 | 1564 | 10 | ++ |
| 1599 | 1578 | 1591 | 12 | − |
| 1601 | 1578 | 1589 | 10 | − |
| 1624 | 1603 | 1616 | 12 | + |
| 1626 | 1603 | 1614 | 10 | + |
| 1649 | 1628 | 1641 | 12 | ++ |
| 1651 | 1628 | 1639 | 10 | ++ |
| 1674 | 1653 | 1666 | 12 | + |
| 1676 | 1653 | 1664 | 10 | − |
| 1699 | 1678 | 1691 | 12 | − |
| 1701 | 1678 | 1689 | 10 | − |
| 1724 | 1703 | 1716 | 12 | + |
| 1726 | 1703 | 1714 | 10 | + |
| 1749 | 1728 | 1741 | 12 | + |
| 1751 | 1728 | 1739 | 10 | − |
| 1773 | 1753 | 1765 | 12 | − |
| 1775 | 1753 | 1763 | 10 | − |
| 1798 | 1777 | 1790 | 12 | − |
| 1800 | 1777 | 1788 | 10 | − |
| 1823 | 1802 | 1815 | 12 | − |
| 1825 | 1802 | 1813 | 10 | − |
| 1844 | 1827 | 1836 | 12 | − |
| 1846 | 1827 | 1834 | 10 | − |
| 1869 | 1848 | 1861 | 12 | − |
| 1871 | 1848 | 1859 | 10 | − |
| 1894 | 1873 | 1886 | 12 | − |
| 1896 | 1873 | 1884 | 10 | − |
| 1919 | 1898 | 1911 | 12 | − |
| 1921 | 1898 | 1909 | 10 | − |
| 1943 | 1923 | 1935 | 12 | − |
| 1945 | 1923 | 1933 | 10 | − |
| 1968 | 1947 | 1960 | 12 | − |
| 1970 | 1947 | 1958 | 10 | − |
| NTC | NTC | NTC | NTC | − |
| NTC | NTC | NTC | NTC | − |
| NTC | NTC | NTC | NTC | − |

¹The PEgRNA sequences used experimentally further contained transcription adaptations for a U6 expression construct, i.e., addition of a 5′ G if the first nucleotide is not a G, addition of 1-7 Us from the U6 transcription termination sequence, e.g., 4 additional Us as a result of transcription from U6 termination sequence.
2.: −: 0-0.36%; +: 0.36%-4.97%; ++: 4.97%-9.57%; +++: 9.57%-14.17%; ++++: 14.17%-18.78%. Standard deviation values are not included in the table. Where average % editing efficiency and (average editing efficiency − 2*standard deviation) fall within different ranges, (average editing efficiency − 2*standard deviation) is used.

### Example 8—Dual Prime Editing for Excision of GAA Repeats in the FXN Gene in Patient Derived iPSCs

[0931] PEgRNA pairs having a 5′ spacer having a spacer having the sequence of SEQ ID NOs: 1, 101, or 234, and a 3′ spacer having a spacer having the sequence of SEQ ID NOs: 631, 1017, and 1215 and varying PBS lengths from 8 nt to 17 nt were tested for editing the FAN gene in patient derived iPSCs line #1. All 5′ PEgRNAs have an RTT of SEQ ID NO: 1972, and all 3′ PEgRNAs have an RTT of SEQ ID NO: 2071. iPSC cells were transfected, and genomic DNA harvested for ddPCR analysis as described in Example 1. The raw FAM/HEX ratio were used as a proxy to estimate editing efficiency.

[0932] The SEQ ID NOs of the PEgRNAs and their components, and the editing efficiency results, are provided in Table 77. Three replicates of negative controls were included, where iPSC cells were cultured and plated in the same way as the edited cells but not contacted with polynucleotides encoding the prime editor or PEgRNA. For each spacer pair used in PEgRNA pairs, dual prime editing was observed for different lengths of PBSs. Improved editing efficiency was observed for PEgRNA pairs having PBS lengths of 10-12 nts.

TABLE 77
dual prime editing to excise GAA repeats in the frataxin
g using 3′ PEgRNA pairs with varying PBS lengths

| | | | 5′ | | | | 3′ | |
|---|---|---|---|---|---|---|---|---|
| 5′ spacer | 5′ PBS | | PEgRNA | 3′ spacer | 3′ PBS | | PEgRNA | |
| SEQ ID | SEQ ID | 5′ PBS | SEQ ID | SEQ ID | SEQ ID | 3′ PBS | SEQ ID | FAM/HE |
| NO | NO | length | NO¹ | NO | NO | length | NO¹ | X ratio² |
| 234 | 243 | 8 | 299 | 631 | 642 | 10 | 654 | ++ |
| 234 | 244 | 9 | 301 | 631 | 642 | 10 | 654 | + |
| 234 | 245 | 10 | 255 | 631 | 642 | 10 | 654 | ++ |
| 234 | 246 | 11 | 303 | 631 | 642 | 10 | 654 | ++ |
| 234 | 247 | 12 | 257 | 631 | 642 | 10 | 654 | + |
| 234 | 248 | 13 | 305 | 631 | 642 | 10 | 654 | + |
| 234 | 249 | 14 | 307 | 631 | 642 | 10 | 654 | + |
| 234 | 250 | 15 | 309 | 631 | 642 | 10 | 654 | + |
| 234 | 251 | 16 | 311 | 631 | 642 | 10 | 654 | + |
| 234 | 252 | 17 | 313 | 631 | 642 | 10 | 654 | − |
| 234 | 243 | 8 | 299 | 1017 | 1030 | 12 | 1038 | + |
| 234 | 244 | 9 | 301 | 1017 | 1030 | 12 | 1038 | + |
| 234 | 245 | 10 | 255 | 1017 | 1030 | 12 | 1038 | ++ |
| 234 | 246 | 11 | 303 | 1017 | 1030 | 12 | 1038 | ++ |
| 234 | 247 | 12 | 257 | 1017 | 1030 | 12 | 1038 | + |
| 234 | 248 | 13 | 305 | 1017 | 1030 | 12 | 1038 | + |
| 234 | 249 | 14 | 307 | 1017 | 1030 | 12 | 1038 | + |
| 234 | 250 | 15 | 309 | 1017 | 1030 | 12 | 1038 | + |
| 234 | 251 | 16 | 311 | 1017 | 1030 | 12 | 1038 | + |
| 234 | 252 | 17 | 313 | 1017 | 1030 | 12 | 1038 | + |
| 234 | 243 | 8 | 299 | 1215 | 1228 | 12 | 1236 | ++ |
| 234 | 244 | 9 | 301 | 1215 | 1228 | 12 | 1236 | + |
| 234 | 245 | 10 | 255 | 1215 | 1228 | 12 | 1236 | ++ |
| 234 | 246 | 11 | 303 | 1215 | 1228 | 12 | 1236 | + |
| 234 | 247 | 12 | 257 | 1215 | 1228 | 12 | 1236 | ++ |
| 234 | 248 | 13 | 305 | 1215 | 1228 | 12 | 1236 | + |
| 234 | 249 | 14 | 307 | 1215 | 1228 | 12 | 1236 | + |
| 234 | 250 | 15 | 309 | 1215 | 1228 | 12 | 1236 | + |
| 234 | 251 | 16 | 311 | 1215 | 1228 | 12 | 1236 | + |
| 234 | 252 | 17 | 313 | 1215 | 1228 | 12 | 1236 | + |
| 101 | 110 | 8 | 202 | 631 | 642 | 10 | 654 | + |
| 101 | 111 | 9 | 204 | 631 | 642 | 10 | 654 | + |
| 101 | 112 | 10 | 122 | 631 | 642 | 10 | 654 | +++ |
| 101 | 113 | 11 | 206 | 631 | 642 | 10 | 654 | ++ |
| 101 | 114 | 12 | 124 | 631 | 642 | 10 | 654 | ++ |
| 101 | 115 | 13 | 208 | 631 | 642 | 10 | 654 | ++ |
| 101 | 116 | 14 | 210 | 631 | 642 | 10 | 654 | + |
| 101 | 117 | 15 | 212 | 631 | 642 | 10 | 654 | + |
| 101 | 118 | 16 | 214 | 631 | 642 | 10 | 654 | + |
| 101 | 119 | 17 | 216 | 631 | 642 | 10 | 654 | + |
| 101 | 110 | 8 | 202 | 1017 | 1030 | 12 | 1038 | + |
| 101 | 111 | 9 | 204 | 1017 | 1030 | 12 | 1038 | + |
| 101 | 112 | 10 | 122 | 1017 | 1030 | 12 | 1038 | ++ |
| 101 | 113 | 11 | 206 | 1017 | 1030 | 12 | 1038 | + |
| 101 | 114 | 12 | 124 | 1017 | 1030 | 12 | 1038 | + |
| 101 | 115 | 13 | 208 | 1017 | 1030 | 12 | 1038 | + |
| 101 | 116 | 14 | 210 | 1017 | 1030 | 12 | 1038 | + |
| 101 | 117 | 15 | 212 | 1017 | 1030 | 12 | 1038 | + |
| 101 | 118 | 16 | 214 | 1017 | 1030 | 12 | 1038 | + |
| 101 | 119 | 17 | 216 | 1017 | 1030 | 12 | 1038 | + |
| 101 | 110 | 8 | 202 | 1215 | 1228 | 12 | 1236 | + |
| 101 | 111 | 9 | 204 | 1215 | 1228 | 12 | 1236 | + |
| 101 | 112 | 10 | 122 | 1215 | 1228 | 12 | 1236 | ++ |
| 101 | 113 | 11 | 206 | 1215 | 1228 | 12 | 1236 | + |
| 101 | 114 | 12 | 124 | 1215 | 1228 | 12 | 1236 | ++ |
| 101 | 115 | 13 | 208 | 1215 | 1228 | 12 | 1236 | ++ |
| 101 | 116 | 14 | 210 | 1215 | 1228 | 12 | 1236 | + |
| 101 | 117 | 15 | 212 | 1215 | 1228 | 12 | 1236 | + |
| 101 | 118 | 16 | 214 | 1215 | 1228 | 12 | 1236 | + |
| 101 | 119 | 17 | 216 | 1215 | 1228 | 12 | 1236 | + |
| 1 | 10 | 8 | 66 | 631 | 642 | 10 | 654 | ++ |
| 1 | 11 | 9 | 68 | 631 | 642 | 10 | 654 | ++ |
| 1 | 12 | 10 | 22 | 631 | 642 | 10 | 654 | ++ |
| 1 | 13 | 11 | 70 | 631 | 642 | 10 | 654 | + |
| 1 | 14 | 12 | 24 | 631 | 642 | 10 | 654 | ++ |
| 1 | 15 | 13 | 73 | 631 | 642 | 10 | 654 | ++ |
| 1 | 16 | 14 | 75 | 631 | 642 | 10 | 654 | ++ |
| 1 | 17 | 15 | 77 | 631 | 642 | 10 | 654 | ++ |
| 1 | 18 | 16 | 79 | 631 | 642 | 10 | 654 | + |
| 1 | 19 | 17 | 81 | 631 | 642 | 10 | 654 | + |
| 1 | 10 | 8 | 66 | 1017 | 1030 | 12 | 1038 | ++ |
| 1 | 11 | 9 | 68 | 1017 | 1030 | 12 | 1038 | ++ |
| 1 | 12 | 10 | 22 | 1017 | 1030 | 12 | 1038 | ++ |
| 1 | 13 | 11 | 70 | 1017 | 1030 | 12 | 1038 | ++ |
| 1 | 14 | 12 | 24 | 1017 | 1030 | 12 | 1038 | + |
| 1 | 15 | 13 | 73 | 1017 | 1030 | 12 | 1038 | + |
| 1 | 16 | 14 | 75 | 1017 | 1030 | 12 | 1038 | + |
| 1 | 17 | 15 | 77 | 1017 | 1030 | 12 | 1038 | + |
| 1 | 18 | 16 | 79 | 1017 | 1030 | 12 | 1038 | + |
| 1 | 19 | 17 | 81 | 1017 | 1030 | 12 | 1038 | − |
| 1 | 10 | 8 | 66 | 1215 | 1228 | 12 | 1236 | ++ |
| 1 | 11 | 9 | 68 | 1215 | 1228 | 12 | 1236 | +++ |
| 1 | 12 | 10 | 22 | 1215 | 1228 | 12 | 1236 | ++ |
| 1 | 13 | 11 | 70 | 1215 | 1228 | 12 | 1236 | ++ |
| 1 | 14 | 12 | 24 | 1215 | 1228 | 12 | 1236 | + |
| 1 | 15 | 13 | 73 | 1215 | 1228 | 12 | 1236 | ++ |
| 1 | 16 | 14 | 75 | 1215 | 1228 | 12 | 1236 | + |
| 1 | 17 | 15 | 77 | 1215 | 1228 | 12 | 1236 | + |
| 1 | 18 | 16 | 79 | 1215 | 1228 | 12 | 1236 | + |
| 1 | 19 | 17 | 81 | 1215 | 1228 | 12 | 1236 | + |
| 234 | 245 | 10 | 255 | 631 | 640 | 8 | 708 | ++ |
| 234 | 245 | 10 | 255 | 631 | 641 | 9 | 710 | +++ |
| 234 | 245 | 10 | 255 | 631 | 642 | 10 | 654 | ++ |
| 234 | 245 | 10 | 255 | 631 | 643 | 11 | 712 | ++ |
| 234 | 245 | 10 | 255 | 631 | 644 | 12 | 652 | ++ |
| 234 | 245 | 10 | 255 | 631 | 645 | 13 | 714 | + |
| 234 | 245 | 10 | 255 | 631 | 646 | 14 | 716 | + |
| 234 | 245 | 10 | 255 | 631 | 647 | 15 | 718 | + |
| 234 | 245 | 10 | 255 | 631 | 648 | 16 | 720 | + |
| 234 | 245 | 10 | 255 | 631 | 649 | 17 | 722 | + |
| 101 | 114 | 12 | 124 | 631 | 640 | 8 | 708 | ++ |
| 101 | 114 | 12 | 124 | 631 | 641 | 9 | 710 | +++ |
| 101 | 114 | 12 | 124 | 631 | 642 | 10 | 654 | +++ |
| 101 | 114 | 12 | 124 | 631 | 643 | 11 | 712 | ++ |
| 101 | 114 | 12 | 124 | 631 | 644 | 12 | 652 | +++ |
| 101 | 114 | 12 | 124 | 631 | 645 | 13 | 714 | ++ |
| 101 | 114 | 12 | 124 | 631 | 646 | 14 | 716 | ++ |
| 101 | 114 | 12 | 124 | 631 | 647 | 15 | 718 | ++ |
| 101 | 114 | 12 | 124 | 631 | 648 | 16 | 720 | + |
| 101 | 114 | 12 | 124 | 631 | 649 | 17 | 722 | + |
| 1 | 14 | 12 | 24 | 631 | 640 | 8 | 708 | +++ |
| 1 | 14 | 12 | 24 | 631 | 641 | 9 | 710 | ++ |
| 1 | 14 | 12 | 24 | 631 | 642 | 10 | 654 | ++++ |
| 1 | 14 | 12 | 24 | 631 | 643 | 11 | 712 | +++ |
| 1 | 14 | 12 | 24 | 631 | 644 | 12 | 652 | ++ |
| 1 | 14 | 12 | 24 | 631 | 645 | 13 | 714 | ++ |
| 1 | 14 | 12 | 24 | 631 | 646 | 14 | 716 | ++ |
| 1 | 14 | 12 | 24 | 631 | 647 | 15 | 718 | ++ |
| 1 | 14 | 12 | 24 | 631 | 648 | 16 | 720 | + |
| 1 | 14 | 12 | 24 | 631 | 649 | 17 | 722 | + |
| 234 | 245 | 10 | 255 | 1017 | 1026 | 8 | 1094 | + |
| 234 | 245 | 10 | 255 | 1017 | 1027 | 9 | 1096 | +++ |
| 234 | 245 | 10 | 255 | 1017 | 1028 | 10 | 1040 | ++ |
| 234 | 245 | 10 | 255 | 1017 | 1029 | 11 | 1099 | +++ |
| 234 | 245 | 10 | 255 | 1017 | 1030 | 12 | 1038 | + |
| 234 | 245 | 10 | 255 | 1017 | 1031 | 13 | 1102 | ++ |
| 234 | 245 | 10 | 255 | 1017 | 1032 | 14 | 1104 | + |
| 234 | 245 | 10 | 255 | 1017 | 1033 | 15 | 1106 | ++ |
| 234 | 245 | 10 | 255 | 1017 | 1034 | 16 | 1108 | + |
| 234 | 245 | 10 | 255 | 1017 | 1035 | 17 | 1110 | + |
| 101 | 114 | 12 | 124 | 1017 | 1026 | 8 | 1094 | +++ |
| 101 | 114 | 12 | 124 | 1017 | 1027 | 9 | 1096 | ++++ |
| 101 | 114 | 12 | 124 | 1017 | 1028 | 10 | 1040 | + |
| 101 | 114 | 12 | 124 | 1017 | 1029 | 11 | 1099 | ++++ |
| 101 | 114 | 12 | 124 | 1017 | 1030 | 12 | 1038 | ++++ |
| 101 | 114 | 12 | 124 | 1017 | 1031 | 13 | 1102 | ++++ |
| 101 | 114 | 12 | 124 | 1017 | 1032 | 14 | 1104 | +++ |
| 101 | 114 | 12 | 124 | 1017 | 1033 | 15 | 1106 | +++ |
| 101 | 114 | 12 | 124 | 1017 | 1034 | 16 | 1108 | +++ |
| 101 | 114 | 12 | 124 | 1017 | 1035 | 17 | 1110 | +++ |
| 1 | 14 | 12 | 24 | 1017 | 1026 | 8 | 1094 | ++++ |
| 1 | 14 | 12 | 24 | 1017 | 1027 | 9 | 1096 | +++ |
| 1 | 14 | 12 | 24 | 1017 | 1028 | 10 | 1040 | + |
| 1 | 14 | 12 | 24 | 1017 | 1029 | 11 | 1099 | ++++ |
| 1 | 14 | 12 | 24 | 1017 | 1030 | 12 | 1038 | +++ |
| 1 | 14 | 12 | 24 | 1017 | 1031 | 13 | 1102 | +++ |
| 1 | 14 | 12 | 24 | 1017 | 1032 | 14 | 1104 | +++ |
| 1 | 14 | 12 | 24 | 1017 | 1033 | 15 | 1106 | ++ |
| 1 | 14 | 12 | 24 | 1017 | 1034 | 16 | 1108 | +++ |
| 1 | 14 | 12 | 24 | 1017 | 1035 | 17 | 1110 | +++ |
| 234 | 245 | 10 | 255 | 1215 | 1224 | 8 | 1292 | ++ |
| 234 | 245 | 10 | 255 | 1215 | 1225 | 9 | 1294 | ++ |
| 234 | 245 | 10 | 255 | 1215 | 1226 | 10 | 1238 | +++ |
| 234 | 245 | 10 | 255 | 1215 | 1227 | 11 | 1296 | ++ |
| 234 | 245 | 10 | 255 | 1215 | 1228 | 12 | 1236 | ++ |
| 234 | 245 | 10 | 255 | 1215 | 1229 | 13 | 1298 | ++ |
| 234 | 245 | 10 | 255 | 1215 | 1230 | 14 | 1300 | + |
| 234 | 245 | 10 | 255 | 1215 | 1231 | 15 | 1302 | + |
| 234 | 245 | 10 | 255 | 1215 | 1232 | 16 | 1304 | + |
| 234 | 245 | 10 | 255 | 1215 | 1233 | 17 | 1306 | + |
| 101 | 114 | 12 | 124 | 1215 | 1224 | 8 | 1292 | ++ |
| 101 | 114 | 12 | 124 | 1215 | 1225 | 9 | 1294 | +++ |
| 101 | 114 | 12 | 124 | 1215 | 1226 | 10 | 1238 | +++ |
| 101 | 114 | 12 | 124 | 1215 | 1227 | 11 | 1296 | +++ |
| 101 | 114 | 12 | 124 | 1215 | 1228 | 12 | 1236 | +++ |
| 101 | 114 | 12 | 124 | 1215 | 1229 | 13 | 1298 | ++ |
| 101 | 114 | 12 | 124 | 1215 | 1230 | 14 | 1300 | ++ |
| 101 | 114 | 12 | 124 | 1215 | 1231 | 15 | 1302 | ++ |
| 101 | 114 | 12 | 124 | 1215 | 1232 | 16 | 1304 | + |
| 101 | 114 | 12 | 124 | 1215 | 1233 | 17 | 1306 | + |
| 1 | 14 | 12 | 24 | 1215 | 1224 | 8 | 1292 | ++ |
| 1 | 14 | 12 | 24 | 1215 | 1225 | 9 | 1294 | +++ |
| 1 | 14 | 12 | 24 | 1215 | 1226 | 10 | 1238 | +++ |
| 1 | 14 | 12 | 24 | 1215 | 1227 | 11 | 1296 | ++++ |
| 1 | 14 | 12 | 24 | 1215 | 1228 | 12 | 1236 | ++++ |
| 1 | 14 | 12 | 24 | 1215 | 1229 | 13 | 1298 | ++ |
| 1 | 14 | 12 | 24 | 1215 | 1230 | 14 | 1300 | ++ |
| 1 | 14 | 12 | 24 | 1215 | 1231 | 15 | 1302 | ++ |
| 1 | 14 | 12 | 24 | 1215 | 1232 | 16 | 1304 | + |
| 1 | 14 | 12 | 24 | 1215 | 1233 | 17 | 1306 | + |

¹The PEgRNA sequences used experimentally further contained transcription adaptations for a U6 expression construct, i.e., addition of a 5′ G if the first nucleotide is not a G, addition of 1-7 Us from the U6 transcription termination sequence, e.g., 4 additional Us as a result of transcription from U6 termination sequence.
²−: 0; +: 0 to 5.66%; ++: 5.66% to 11.3%; +++: 11.3% to 16.98%; ++++: 16.98% to 22.64%.

### Example 9—Dual Prime Editing Excises GAA Repeats in FXN Gene and Restores Frataxin Expression

[0933] Expression level of the FXN mRNA was examined in iPSC cells edited with dual prime editing PEgRNAs and prime editor fusion protein.

[0934] iPSCs from the healthy donor and patient #1 were transfected with polynucleotides encoding PEgRNA pairs and the prime editor fusion protein as described in in Example 1. 72 hours later, cells were harvested for genomic DNA and RNA extraction: for each PEgRNA pair, one well of cells were harvested for genomic DNA extraction, and a separate well of cells harvested for RNA extraction. Genomic DNA was extracted with and subsequently sequenced and analyzed for dual prime editing as described in Example 1. Total RNA was extracted using Qiagen RNeasy Micro kit including an on-column DNAse digestion for 15 min. RNA was eluted in 14 ul H₂O respectively. cDNA synthesis was performed using High Capacity Reverse Transcription kit (Applied Biosciences). Expression of the FXN gene at the mRNA level was accessed with qRT-PCR, using the GAPDH gene as a house-keeping expression reference.

[0935] The QuantStudio 6 Pro Real-time PCR system was used to perform qRT-PCR. Each sample included three technical replicates. FXN expression was normalized to the expression level of GAPDH using the following formula: Relative Quantity (RQ)=(2\hat{ }(CT_{GAPDH}-CT_{FXN}))*1000. Dual prime editing efficiency was also assessed in dual-prime edited patient iPSCs.

[0936] The SEQ ID NOs of the PEgRNA pairs used to edit the patient iPSC cells, FXN mRNA expression, and editing results are summarized in Table 78. For each sample, three technical replicates were included. Compared to untreated patient iPSC cells, patient iPSC cells edited with all 9 PEgRNA pairs exhibit restored total FXN expression. In multiple samples, the restored FXN expression in edited iPSC cells was comparable to that of healthy iPSC cells.

TABLE 78
FXN mRNA expression levels in iPSC cells dual prime edited with PERNAs and prime editor fusion protein

| | | 5′ | | | | 3′ | | | | | |
|---|---|---|---|---|---|---|---|---|---|---|---|
| 5′ | 5′ | PBS | | 3′ | 3 | PBS | | | | | |
| PEgRNA | spacer | SEQ | | PERNA | spacer | SEQ | | | Average | | |
| SEQ | SEQ ID | ID | 5′ PBS | SEQ | SEQ ID | ID | 3′ PBS | Cell | Expression | Expression | % |
| ID NO¹ | NO | NO | length | ID NO¹ | NO | NO | length | Type | Normalized | Stdev | Editing² |
| NA | NA | NA | NA | NA | NA | NA | NA | FRDA | 2.99 | 0.11 | NA |
| | | | | | | | | iPSC, | | | |
| | | | | | | | | untreated | | | |
| NA | NA | NA | NA | NA | NA | NA | NA | FRDA | 5.25 | 0.34 | − |
| | | | | | | | | iPSC, | | | |
| | | | | | | | | untreated | | | |
| NA | NA | NA | NA | NA | NA | NA | NA | FRDA | 5.23 | 0.08 | − |
| | | | | | | | | iPSC, | | | |
| | | | | | | | | untreated | | | |
| 257 | 234 | 247 | 12 | 652 | 631 | 644 | 12 | FRDA | 5.83 | 1.25 | + |
| | | | | | | | | iPSC | | | |
| 257 | 234 | 247 | 12 | 1038* | 1017 | 1030 | 12 | FRDA | 8.72 | 0.42 | ++ |
| | | | | | | | | iPSC | | | |
| 257 | 234 | 247 | 12 | 1238 | 1215 | 1226 | 10 | FRDA | 8.36 | 0.08 | +++ |
| | | | | | | | | iPSC | | | |
| 124 | 101 | 114 | 12 | 652 | 631 | 644 | 12 | FRDA | 8.45 | 0.53 | ++ |
| | | | | | | | | iPSC | | | |
| 124 | 101 | 114 | 12 | 1038* | 1017 | 1030 | 12 | FRDA | 10.08 | 1.94 | ++++ |
| | | | | | | | | iPSC | | | |
| 124 | 101 | 114 | 12 | 1238 | 1215 | 1226 | 10 | FRDA | 11.56 | 1.11 | ++++ |
| | | | | | | | | iPSC | | | |
| 24* | 1 | 14 | 12 | 652 | 631 | 644 | 12 | FRDA | 8.15 | 0.97 | ++ |
| | | | | | | | | iPSC | | | |
| 24* | 1 | 14 | 12 | 1038* | 1017 | 1030 | 12 | FRDA | 9.61 | 0.04 | +++ |
| | | | | | | | | iPSC | | | |
| 24* | 1 | 14 | 12 | 1238 | 1215 | 1226 | 10 | FRDA | 9.41 | 0.23 | +++ |
| | | | | | | | | iPSC | | | |
| NA | NA | NA | NA | NA | NA | NA | NA | Healthy | 11.50 | 0.35 | NA |
| | | | | | | | | iPSC, | | | |
| | | | | | | | | untreated | | | |
| NA | NA | NA | NA | NA | NA | NA | NA | Healthy | 15.30 | 0.52 | NA |
| | | | | | | | | iPSC, | | | |
| | | | | | | | | untreated | | | |
| 257 | 234 | 247 | 12 | 652 | 631 | 644 | 12 | Healthy | 17.19 | 0.56 | NA |
| | | | | | | | | iPSC | | | |
| 257 | 234 | 247 | 12 | 1038* | 1017 | 1030 | 12 | Healthy | 16.37 | 0.33 | NA |
| | | | | | | | | iPSC | | | |
| 257 | 234 | 247 | 12 | 1238 | 1215 | 1226 | 10 | Healthy | 14.41 | 0.76 | NA |
| | | | | | | | | iPSC | | | |
| 124 | 101 | 114 | 12 | 652 | 631 | 644 | 12 | Healthy | 14.40 | 0.45 | NA |
| | | | | | | | | iPSC | | | |
| 124 | 101 | 114 | 12 | 1038* | 1017 | 1030 | 12 | Healthy | 14.05 | 0.60 | NA |
| | | | | | | | | iPSC | | | |
| 124 | 101 | 114 | 12 | 1238 | 1215 | 1226 | 10 | Healthy | 15.62 | 0.47 | NA |
| | | | | | | | | iPSC | | | |
| 24* | 1 | 14 | 12 | 652 | 631 | 644 | 12 | Healthy | 13.50 | 1.52 | NA |
| | | | | | | | | iPSC | | | |
| 24* | 1 | 14 | 12 | 1038* | 1017 | 1030 | 12 | Healthy | 14.87 | 0.31 | NA |
| | | | | | | | | iPSC | | | |
| 24* | 1 | 14 | 12 | 1238 | 1215 | 1226 | 10 | Healthy | 16.02 | 0.62 | NA |
| | | | | | | | | iPSC | | | |

¹The PEgRNA sequences used experimentally further contained transcriptation adaptations for a U6 expression construct, i.e., addition of a 5′ G if the first nucleotide is not a G, addition of 1-7 Us from the U6 transcription termination sequence, e.g., 4 additional Us as a result of transcription from U6 termination sequence. The PEgRNA sequences used experimentally for SEQ ID NOs annotated with an aster “*” further containedan additional A between 3′ end of the PBS and the U6 termination sequence.
²−: 0; +: 0 to 15.24%; ++: 15.24% to 30.47%; +++: 30.47% to 45.71%; ++++: 45.71% to 60.94%

[0937] Pearson correlation analysis was performed to evaluate the correlation between FXN mRNA expression and dual prime editing efficiency of the FXN gene: the correlation coefficient R is 0.8960 (P value=0.0011), indicating the positive correlation between successful dual prime editing and restored FXN expression at the mRNA level.

### Example 10—Dual Prime Editing Excises GAA Repeats in FXN Gene and Restores Frataxin Expression

[0938] Frataxin protein expression was examined in isogenic cells derived from edited patient iPSC #1 as well as healthy iPSCs and unedited patient iPSCs.

[0939] Establishing dual prime edited clonal lines. FRDA iPSCs were transfected with polynucleotides encoding PEgRNA pairs and prime editor fusion protein as described in Example 1. Patient iPSC #1 edited with 5′ PEgRNA having the sequence of SEQ ID NO: 124 (spacer SEQ ID NO: 101, RTT SEQ ID NO: 1972, PBS SEQ ID NO: 114) and 3′ PEgRNA having the sequence of SEQ ID NO: 1038 (spacer SEQ ID NO: 1017, RTT SEQ ID NO: 2071, PBS SEQ ID NO: 1030) were used to establish isogenic clonal lines. 3 days after transfection, the transfected iPSCs were dissociated into single cells and transferred to a bigger plate to establish single colonies. A few days later, when single colonies become visible under microscope, they were picked and transferred to individual wells in a 96-well plate.

[0940] Genomic DNA was extracted from each individual clonal iPSC lines, and editing status was evaluated by ddPCR as described in Example 1. 19 Clonal lines were evaluated; FAM/HEX ratios from these clonal lines roughly fell into 3 ranges: 1) a first group of samples with FAM/HEX value close to 0, 2) a second group of samples have FAM/HEX value around 0.5, and 3) a third group having FAM/HEX value about 1% of the FAM/HEX value of clones in group 2. It may be presumed that clones in group 1 contain no editing in either of the FXN alleles, the clones in group 2 contain two edited FXN alleles, and group 3 contains one edited and one unedited FXN allele.

[0941] Isogenic iPSC lines were generated from clones as described above. One isogenic line of cells from group 2 (referred to herein as clone 1) and group 3 (referred to herein as clone 2), as well as healthy iPSC cells from healthy and unedited patient iPSC #1 cells were used to analyze frataxin protein expression. The cells were cultured and then collected as cell pellets. Cells were lysed using chilled 1×RIPA lysis buffer (Protease Inhibitors added). Protein expression was measured by labeling with Anti-Frataxin antibody [18A5DB1](Abeam) and anti-GAPDH (14C10) (Cell Signaling) mouse monoclonal antibodies and a labeled rabbit secondary antibody. Both mature frataxin and frataxin intermediate were detected, protein concentrations quantified, and loaded in Protein JESS system following manufacture's protocol. Quantification of signal intensity was performed using Protein JESS software. Normalized protein level was quantified using the following formula: Normalized protein level=band intensity of Frataxin/band intensity of GAPDH. The normalized frataxin protein expression results are summarized in Table 79. In dual-prime edited clones, frataxin expression was restored compared to untreated disease iPSC lines. In addition, correction of one of the two FXN alleles was able to at least partially restore Frataxin protein expression.

TABLE 79
Frataxin protein expression after dual prime editing with
select PEgRNA pairs and prime editor fusion protein

| Sample | Target | Normalized protein Level |
|---|---|---|
| Healthy iPSC | FXN (mature) | 0.4646 |
| FRDA iPSC | FXN (mature) | 0.0930 |
| clone 1 | FXN (mature) | 0.4362 |
| clone 2 | FXN (mature) | 0.2058 |
| Healthy iPSC | FXN (intermediate) | 0.3229 |
| FRDA iPSC | FXN (intermediate) | 0.0000 |
| clone 1 | FXN (intermediate) | 0.4875 |
| clone 2 | FXN (intermediate) | 0.1206 |

### Example 11—Frataxin Expression and Phenotypic Rescue of Axonal Projection in Dual Prime Edited Cells

[0942] iPSC derived dorsal ganglia organoids (iDRGs) were used to examine frataxin expression and phenotype restoration by dual prime editing. iDRGs were differentiated from healthy iPSCs, disease iPSC line #1, and the two prime edited clonal lines of iPSCs, clone 1 and clone 2, as described in Example 10. The iDRGs were analyzed for restoration of frataxin expression and axonal projection using whole-mount immunofluorescence imaging. iDRG organoids were fixed in 4% paraformaldehyde and permeabilized for 1 h in 5% Donkey serum-PBS containing 0.10% Triton-X. After that, organoids were incubated overnight at 4° C. in primary frataxin antibody cocktail. Next day, the cells were washed in 1×PBS and incubated with appropriate secondary antibodies Alexa Fluor 488, 555 or 647 (1 h at room temperature), washed with 1×PBS again and performed nuclear stain using DAPI (1:10,000, 10 min at room temperature). All images were collected using Nikon Eclipse Ti2 fluorescence microscope coupled with a Nikon A1R point scanning confocal instrument with 10, 40 and 63× objectives followed by processing with ImageJ software.

[0943] Compared to healthy iDRGs, iDRGs derived from disease iPSCs show both impaired axonal growth, as shown in FIG. 5. The left panel in FIG. 5 (FIGS. 5A and 5D) demonstrates axonal growth in healthy iDRGs compared to that in iDRG derived from patient cell line #1, with axonal growth focused view at the lower left corners. The right panel in FIG. 5 (FIGS. 5C and 5F) illustrates frataxin protein staining in healthy iDRGs and reduced frataxin level in patient cell derived iDRGs. The middle panel of FIG. 5 (FIGS. 5B and 5E) shows DAPI imaging as a reference.

[0944] Restored frataxin protein in iDRGs derived from prime edited iPSCs are demonstrated in FIG. 6. FIG. 6A-D shows Frataxin staining images in the upper row. FIG. 6E-H show DAPI reference images in the lower row. Consistent with the result shown in FIG. 5, reduced frataxin expression was observed in iDRGs derived from disease iPSC line #1 (FIG. 6B) compared to healthy iDRGs (FIG. 6A). Compared to the disease iDRGs, frataxin expression was restored in iDRGs derived from clone 2 (FIG. 6C), and more efficiently restored in iDRG derived from clone 1 (FIGS. 6D and 6H).

[0945] Restored axonal projection in iDRGs derived from prime edited iPSCs are shown in FIG. 7. Neuroprotein βIII-TUB was used as a marker for staining to show axonal growth, and DAPI was used as reference. Impaired axonal growth was observed in iDRGs derived from disease iPSC line #1 (FIG. 7B) compared to healthy iDRGs (FIG. 7A). In iDRGs derived from both iPSC clone 2 and clone 1 (FIGS. 7C and 7D, respectively), axonal growth was restored. Therefore, dual prime editing of one of the two mutated FXN alleles may be able to restore axonal projection in FRDA diseased cells.

### Example 12. Dual Prime Editing for Excision of GAA Repeats in Wild Type Frataxin Gene in Synthetic Sites in HEK293T Cells

[0946] Additional PEgRNAs having a region of complementarity between the 5′ RTT and the 3′ RTTs were examined for dual prime editing in HEK293T cells. The 5′ PEgRNAs have a spacer with the sequence of SEQ ID NO 1, 101, or 234, and the 3′ PEgRNAs having a spacer with the sequence of SEQ ID NO 631, 1017, or 1215. 15 pairs of RTT sequences were tested, including a pair of RTT encoding an attB insert (SEQ ID NOs: 1972 and 2071, respectively) that are completely complement to each other, and 14 pairs of RTTs, of which the 5′RTT and the 3′ RTT that are partially complementary to each other.

[0947] PEgRNAs were assembled as described by the second method in Example 1. A synthetic target site containing 6 protospacer sequences corresponding to the three 5′ spacers and three 3′ spacers from the FXN locus were integrated into wildtype HEK293T cells lentivirally at low multiplicity of infection. This target site was designed to contain 3 protospacers (corresponding to the 5′ spacers) on the left and 3 protospacers facing the reverse direction on the right (corresponding to the 3′ spacers). Polyclonal HEK293T cells containing this site were propagated in DMEM with 10% FBS. Prior to transfection, polyclonal cells were seeded in 96-well plates and then transfected with Lipofectamine 2000 according to the manufacturer's directions with plasmids encoding a prime editor fusion protein and a pair of PEgRNAs. 72 hours after transfection, genomic DNA was harvested in lysis buffer and the synthetic target site was PCR amplified for sequencing and analysis. For high throughput sequencing and analysis with Miseq, editing efficiency was calculated using the following formula: editing efficiency=(numerator/denominator) %, wherein the numerator is the number of reads that align to the amplicon target site modified with the expected edit and the denominator is the number of reads for which any significant part of the read maps to the target site. Indel frequency was calculated using the formula: indel frequency=(numerator/denominator) %, wherein the denominator is the same as in editing efficiency calculation, and the numerator is the number of reads that align to any rearrangement of the target site that is not the expected edit.

[0948] PEgRNA sequences and editing results are summarized in Table 80 below. The partially complementary 5′RTTs and 3′RTTs is also provided in Table 56. Dual prime editing observed with PEgRNAs containing these RTTs indicates that partial complementarity, including complementarity as low as about 18% of the total insert (RD) length, is capable of mediating successful dual prime editing.

TABLE 80
Dual prime editing at a synthetic FXN target site in HEK293T cells

| 5′ | | | | | 3′ | | | | | | |
|---|---|---|---|---|---|---|---|---|---|---|---|
| PEgRNA | 5′ spacer | 5′ RTT | 5′ PBS | | PEgRNA | 3′ spacer | 3′ RTT | 3′PBS | | | |
| SEQ ID | SEQ ID | SEQ ID | SEQ ID | 5′ PBS | SEQ ID | SEQ ID | SEQ ID | SEQ ID | 3′ PBS | % | % |
| NO¹ | NO | NO | NO | length | NO¹ | NO | NO | NO | length | Editing² | Indels³ |
| 2514 | 1 | 2401 | 14 | 12 | 2542* | 631 | 2500 | 641 | 9 | + | ++ |
| 2515 | 1 | 2402 | 14 | 12 | 2543* | 631 | 2501 | 641 | 9 | ++ | ++ |
| 24 | 1 | 1972 | 14 | 12 | 710* | 631 | 2071 | 641 | 9 | ++++ | + |
| 2514 | 1 | 2401 | 14 | 12 | 2546* | 631 | 2500 | 643 | 11 | + | ++ |
| 2515 | 1 | 2402 | 14 | 12 | 2547* | 631 | 2501 | 643 | 11 | + | + |
| 24 | 1 | 1972 | 14 | 12 | 712* | 631 | 2071 | 643 | 11 | ++++ | + |
| 24 | 1 | 1972 | 14 | 12 | 1099 | 1017 | 2071 | 1029 | 11 | ++++ | + |
| 2516 | 1 | 2403 | 14 | 12 | 2549 | 1017 | 2502 | 1029 | 11 | ++ | ++ |
| 2517 | 1 | 2404 | 14 | 12 | 2550 | 1017 | 2503 | 1029 | 11 | + | ++ |
| 24 | 1 | 1972 | 14 | 12 | 1102 | 1017 | 2071 | 1031 | 13 | ++++ | + |
| 2516 | 1 | 2403 | 14 | 12 | 2555 | 1017 | 2502 | 1031 | 13 | ++ | ++ |
| 2517 | 1 | 2404 | 14 | 12 | 2556 | 1017 | 2503 | 1031 | 13 | + | ++ |
| 24 | 1 | 1972 | 14 | 12 | 1296 | 1215 | 2071 | 1227 | 11 | ++++ | + |
| 24 | 1 | 1972 | 14 | 12 | 1236 | 1215 | 2071 | 1228 | 12 | ++++ | + |
| 2518 | 1 | 2401 | 15 | 13 | 2542* | 631 | 2500 | 641 | 9 | + | + |
| 2519 | 1 | 2402 | 15 | 13 | 2543* | 631 | 2501 | 641 | 9 | ++ | ++ |
| 73 | 1 | 1972 | 15 | 13 | 710* | 631 | 2071 | 641 | 9 | ++++ | + |
| 2518 | 1 | 2401 | 15 | 13 | 2546* | 631 | 2500 | 643 | 11 | + | ++ |
| 2519 | 1 | 2402 | 15 | 13 | 2547* | 631 | 2501 | 643 | 11 | + | ++ |
| 73 | 1 | 1972 | 15 | 13 | 712* | 631 | 2071 | 643 | 11 | ++++ | + |
| 73 | 1 | 1972 | 15 | 13 | 1099 | 1017 | 2071 | 1029 | 11 | ++++ | + |
| 2520 | 1 | 2403 | 15 | 13 | 2549 | 1017 | 2502 | 1029 | 11 | ++ | ++ |
| 2521 | 1 | 2404 | 15 | 13 | 2550 | 1017 | 2503 | 1029 | 11 | + | ++ |
| 73 | 1 | 1972 | 15 | 13 | 1102 | 1017 | 2071 | 1031 | 13 | ++++ | + |
| 2520 | 1 | 2403 | 15 | 13 | 2555 | 1017 | 2502 | 1031 | 13 | ++ | ++ |
| 2521 | 1 | 2404 | 15 | 13 | 2556 | 1017 | 2503 | 1031 | 13 | + | ++ |
| 73 | 1 | 1972 | 15 | 13 | 1296 | 1215 | 2071 | 1227 | 11 | ++++ | + |
| 73 | 1 | 1972 | 15 | 13 | 1236 | 1215 | 2071 | 1228 | 12 | ++++ | + |
| 2522* | 101 | 2405 | 114 | 12 | 2544* | 631 | 2504 | 641 | 9 | + | + |
| 2523* | 101 | 2406 | 114 | 12 | 2545* | 631 | 2505 | 641 | 9 | + | ++ |
| 124* | 101 | 1972 | 114 | 12 | 710* | 631 | 2071 | 641 | 9 | +++ | ++ |
| 2523* | 101 | 2406 | 114 | 12 | 2548* | 631 | 2505 | 643 | 11 | + | + |
| 124* | 101 | 1972 | 114 | 12 | 712* | 631 | 2071 | 643 | 11 | +++ | ++ |
| 124* | 101 | 1972 | 114 | 12 | 1099 | 1017 | 2071 | 1029 | 11 | ++++ | + |
| 2524* | 101 | 2407 | 114 | 12 | 2551 | 1017 | 2506 | 1029 | 11 | + | +++ |
| 2525* | 101 | 2408 | 114 | 12 | 2552 | 1017 | 2507 | 1029 | 11 | + | +++ |
| 124* | 101 | 1972 | 114 | 12 | 1102 | 1017 | 2071 | 1031 | 13 | ++++ | + |
| 2525* | 101 | 2408 | 114 | 12 | 2558 | 1017 | 2507 | 1031 | 13 | + | +++ |
| 2524* | 101 | 2407 | 114 | 12 | 2557 | 1017 | 2506 | 1031 | 13 | + | +++ |
| 124* | 101 | 1972 | 114 | 12 | 1296 | 1215 | 2071 | 1227 | 11 | ++++ | + |
| 2526* | 101 | 2409 | 114 | 12 | 2561 | 1215 | 2508 | 1227 | 11 | + | ++ |
| 2527* | 101 | 2410 | 114 | 12 | 2562 | 1215 | 2509 | 1227 | 11 | + | ++++ |
| 124* | 101 | 1972 | 114 | 12 | 1236 | 1215 | 2071 | 1228 | 12 | ++++ | + |
| 2526* | 101 | 2409 | 114 | 12 | 2565 | 1215 | 2508 | 1228 | 12 | + | ++ |
| 2527* | 101 | 2410 | 114 | 12 | 2566 | 1215 | 2509 | 1228 | 12 | + | +++ |
| 2528* | 101 | 2405 | 115 | 13 | 2544* | 631 | 2504 | 641 | 9 | + | + |
| 2529* | 101 | 2406 | 115 | 13 | 2545* | 631 | 2505 | 641 | 9 | + | ++ |
| 208* | 101 | 1972 | 115 | 13 | 710* | 631 | 2071 | 641 | 9 | +++ | + |
| 2529* | 101 | 2406 | 115 | 13 | 2548* | 631 | 2505 | 643 | 11 | + | + |
| 208* | 101 | 1972 | 115 | 13 | 712* | 631 | 2071 | 643 | 11 | +++ | + |
| 208* | 101 | 1972 | 115 | 13 | 1099 | 1017 | 2071 | 1029 | 11 | ++++ | + |
| 2530* | 101 | 2407 | 115 | 13 | 2551 | 1017 | 2506 | 1029 | 11 | + | +++ |
| 2531* | 101 | 2408 | 115 | 13 | 2552 | 1017 | 2507 | 1029 | 11 | + | +++ |
| 208* | 101 | 1972 | 115 | 13 | 1102 | 1017 | 2071 | 1031 | 13 | ++++ | + |
| 2531* | 101 | 2408 | 115 | 13 | 2558 | 1017 | 2507 | 1031 | 13 | + | +++ |
| 2530* | 101 | 2407 | 115 | 13 | 2557 | 1017 | 2506 | 1031 | 13 | + | +++ |
| 208* | 101 | 1972 | 115 | 13 | 1296 | 1215 | 2071 | 1227 | 11 | ++++ | + |
| 2532* | 101 | 2409 | 115 | 13 | 2561 | 1215 | 2508 | 1227 | 11 | + | + |
| 2533* | 101 | 2410 | 115 | 13 | 2562 | 1215 | 2509 | 1227 | 11 | + | +++ |
| 208* | 101 | 1972 | 115 | 13 | 1236 | 1215 | 2071 | 1228 | 12 | ++++ | + |
| 2532* | 101 | 2409 | 115 | 13 | 2565 | 1215 | 2508 | 1228 | 12 | + | ++ |
| 2533* | 101 | 2410 | 115 | 13 | 2566 | 1215 | 2509 | 1228 | 12 | + | +++ |
| 257 | 234 | 1972 | 247 | 12 | 710* | 631 | 2071 | 641 | 9 | +++ | + |
| 257 | 234 | 1972 | 247 | 12 | 712* | 631 | 2071 | 643 | 11 | +++ | + |
| 257 | 234 | 1972 | 247 | 12 | 1099 | 1017 | 2071 | 1029 | 11 | ++++ | + |
| 2534 | 234 | 2411 | 247 | 12 | 2553 | 1017 | 2510 | 1029 | 11 | + | ++ |
| 2535 | 234 | 2412 | 247 | 12 | 2554 | 1017 | 2511 | 1029 | 11 | + | +++ |
| 257 | 234 | 1972 | 247 | 12 | 1102 | 1017 | 2071 | 1031 | 13 | ++++ | + |
| 2534 | 234 | 2411 | 247 | 12 | 2559 | 1017 | 2510 | 1031 | 13 | + | ++ |
| 2535 | 234 | 2412 | 247 | 12 | 2560 | 1017 | 2511 | 1031 | 13 | + | ++ |
| 257 | 234 | 1972 | 247 | 12 | 1296 | 1215 | 2071 | 1227 | 11 | ++++ | + |
| 2536 | 234 | 2413 | 247 | 12 | 2563 | 1215 | 2512 | 1227 | 11 | + | ++ |
| 2537 | 234 | 2414 | 247 | 12 | 2564 | 1215 | 2513 | 1227 | 11 | + | ++ |
| 257 | 234 | 1972 | 247 | 12 | 1236 | 1215 | 2071 | 1228 | 12 | ++++ | + |
| 2537 | 234 | 2414 | 247 | 12 | 2567 | 1215 | 2513 | 1228 | 12 | + | ++ |
| 305 | 234 | 1972 | 248 | 13 | 710* | 631 | 2071 | 641 | 9 | +++ | ++ |
| 305 | 234 | 1972 | 248 | 13 | 712* | 631 | 2071 | 643 | 11 | ++ | + |
| 305 | 234 | 1972 | 248 | 13 | 1099 | 1017 | 2071 | 1029 | 11 | +++ | + |
| 2538 | 234 | 2411 | 248 | 13 | 2553 | 1017 | 2510 | 1029 | 11 | + | ++ |
| 2539 | 234 | 2412 | 248 | 13 | 2554 | 1017 | 2511 | 1029 | 11 | + | +++ |
| 305 | 234 | 1972 | 248 | 13 | 1102 | 1017 | 2071 | 1031 | 13 | +++ | + |
| 2538 | 234 | 2411 | 248 | 13 | 2559 | 1017 | 2510 | 1031 | 13 | + | ++ |
| 2539 | 234 | 2412 | 248 | 13 | 2560 | 1017 | 2511 | 1031 | 13 | + | ++ |
| 305 | 234 | 1972 | 248 | 13 | 1296 | 1215 | 2071 | 1227 | 11 | ++++ | + |
| 2540 | 234 | 2413 | 248 | 13 | 2563 | 1215 | 2512 | 1227 | 11 | + | ++ |
| 2541 | 234 | 2414 | 248 | 13 | 2564 | 1215 | 2513 | 1227 | 11 | + | ++ |
| 305 | 234 | 1972 | 248 | 13 | 1236 | 1215 | 2071 | 1228 | 12 | ++++ | + |
| 2541 | 234 | 2414 | 248 | 13 | 2567 | 1215 | 2513 | 1228 | 12 | + | ++ |

¹All PEgRNAs were transcribed from sequences further including an additional 3′ TTTTTTT transcription adaptation; the PEgRNAs annotated with “*” were transcribed from sequences that also include an extra 5′G transcription adaptation.
²Editing efficiencies are annotated as follows. +: 2.76% to 21.59%; ++: 21.59% to 40.42%; +++: 40.42% to 59.25%; ++++: 59.25% to 78.07%. Except for “+” where 2.76% is included, all ranges include the upper limit and not the lower limit.
³Indel frequencies are annotated as follows. +: 5.26% to 9.84%; ++: 9.84% to 14.41%; +++: 14.41% to 18.98%; ++++: 18.98% to 23.56%. Except for “+” where 5.26% is included, all ranges include the upper limit and not the lower limit.

TABLE 81
Amino acid sequences for components dual prime editing compositions

| SEQ | | |
|---|---|---|
| ID NO: | Description | Sequence |
| 2282 | WT M-MLV | TLNIEDEHRLHETSKEPDVSLGSTWLSDFPQAWAETGGMGLA |
| | RT | VRQAPLIIPLKATSTPVSIKQYPMSQEARLGIKPHIQRLLDQGIL |
| | | VPCQSPWNTPLLPVKKPGTNDYRPVQDLREVNKRVEDIHPTVP |
| | | NPYNLLSGLPPSHQWYTVLDLKDAFFCLRLHPTSQPLFAFEWR |
| | | DPEMGISGQLTWTRLPQGFKNSPTLFDEALHRDLADFRIQHPD |
| | | LILLQYVDDLLLAATSELDCQQGTRALLQTLGNLGYRASAKK |
| | | AQICQKQVKYLGYLLKEGQRWLTEARKETVMGQPTPKTPRQL |
| | | REFLGTAGFCRLWIPGFAEMAAPLYPLTKTGTLFNWGPDQQK |
| | | AYQEIKQALLTAPALGLPDLTKPFELFVDEKQGYAKGVLTQKL |
| | | GPWRRPVAYLSKKLDPVAAGWPPCLRMVAAIAVLTKDAGKL |
| | | TMGQPLVILAPHAVEALVKQPPDRWLSNARMTHYQALLLDT |
| | | DRVQFGPVVALNPATLLPLPEEGLQHNCLDILAEAHGTRPDLT |
| | | DQPLPDADHTWYTDGSSLLQEGQRKAGAAVTTETEVIWAKA |
| | | LPAGTSAQRAELIALTQALKMAEGKKLNVYTDSRYAFATAHI |
| | | HGEIYRRRGLLTSEGKEIKNKDEILALLKALFLPKRLSIIHCPGH |
| | | QKGHSAEARGNRMADQAARKAAITETPDTSTLLIENSSP |
| 2284 | Reference | TLNIEDEYRLHETSKEPDVSLGSTWLSDFPQAWAETGGMGLA |
| | M-MLV RT; | VRQAPLIIPLKATSTPVSIKQYPMSQEARLGIKPHIQRLLDQGIL |
| | M-MLV | VPCQSPWNTPLLPVKKPGTNDYRPVQDLREVNKRVEDIHPTVP |
| | (H8Y) RT | NPYNLLSGLPPSHQWYTVLDLKDAFFCLRLHPTSQPLFAFEWR |
| | | DPEMGISGQLTWTRLPQGFKNSPTLFDEALHRDLADFRIQHPD |
| | | LILLQYVDDLLLAATSELDCQQGTRALLQTLGNLGYRASAKK |
| | | AQICQKQVKYLGYLLKEGQRWLTEARKETVMGQPTPKTPRQL |
| | | REFLGTAGFCRLWIPGFAEMAAPLYPLTKTGTLFNWGPDQQK |
| | | AYQEIKQALLTAPALGLPDLTKPFELFVDEKQGYAKGVLTQKL |
| | | GPWRRPVAYLSKKLDPVAAGWPPCLRMVAAIAVLTKDAGKL |
| | | TMGQPLVILAPHAVEALVKQPPDRWLSNARMTHYQALLLDT |
| | | DRVQFGPVVALNPATLLPLPEEGLQHNCLDILAEAHGTRPDLT |
| | | DQPLPDADHTWYTDGSSLLQEGQRKAGAAVTTETEVIWAKA |
| | | LPAGTSAQRAELIALTQALKMAEGKKLNVYTDSRYAFATAHI |
| | | HGEIYRRRGLLTSEGKEIKNKDEILALLKALFLPKRLSIIHCPGH |
| | | QKGHSAEARGNRMADQAARKAAITETPDTSTLLIENSSP |
| 2283 | M-MLV RT | TLNIEDEYRLHETSKEPDVSLGSTWLSDFPQAWAETGGMGLA |
| | (pentamutant | VRQAPLIIPLKATSTPVSIKQYPMSQEARLGIKPHIQRLLDQGIL |
| | compared to | VPCQSPWNTPLLPVKKPGTNDYRPVQDLREVNKRVEDIHPTVP |
| | Reference | NPYNLLSGLPPSHQWYTVLDLKDAFFCLRLHPTSQPLFAFEWR |
| | M-MLV) or | DPEMGISGQLTWTRLPQGFKNSPTLFNEALHRDLADFRIQHPD |
| | PEmax- | LILLQYVDDLLLAATSELDCQQGTRALLQTLGNLGYRASAKK |
| | MMLV_RT | AQICQKQVKYLGYLLKEGQRWLTEARKETVMGQPTPKTPRQL |
| | D200N | REFLGKAGFCRLFIPGFAEMAAPLYPLTKPGTLFNWGPDQQKA |
| | T330P | YQEIKQALLTAPALGLPDLTKPFELFVDEKQGYAKGVLTQKLG |
| | L603W | PWRRPVAYLSKKLDPVAAGWPPCLRMVAAIAVLTKDAGKLT |
| | T306K | MGQPLVILAPHAVEALVKQPPDRWLSNARMTHYQALLLDTD |
| | W313F | RVQFGPVVALNPATLLPLPEEGLQHNCLDILAEAHGTRPDLTD |
| | | QPLPDADHTWYTDGSSLLQEGQRKAGAAVTTETEVIWAKALP |
| | | AGTSAQRAELIALTQALKMAEGKKLNVYTDSRYAFATAHIHG |
| | | EIYRRRGWLTSEGKEIKNKDEILALLKALFLPKRLSIIHCPGHQ |
| | | KGHSAEARGNRMADQAARKAAITETPDTSTLLIENSSP |
| 2285 | Wild Type | MDKKYSIGLDIGTNSVGWAVITDEYKVPSKKFKVLGNTDRHSI |
| | Streptococcus | KKNLIGALLFDSGETAEATRLKRTARRRYTRRKNRICYLQEIFS |
| | pyogenes | NEMAKVDDSFFHRLEESFLVEEDKKHERHPIFGNIVDEVAYHE |
| | Cas9 | KYPTIYHLRKKLVDSTDKADLRLIYLALAHMIKFRGHFLIEGD |
| | (SpCas9) | LNPDNSDVDKLFIQLVQTYNQLFEENPINASGVDAKAILSARLS |
| | | KSRRLENLIAQLPGEKKNGLFGNLIALSLGLTPNFKSNFDLAED |
| | | AKLQLSKDTYDDDLDNLLAQIGDQYADLFLAAKNLSDAILLS |
| | | DILRVNTEITKAPLSASMIKRYDEHHQDLTLLKALVRQQLPEK |
| | | YKEIFFDQSKNGYAGYIDGGASQEEFYKFIKPILEKMDGTEELL |
| | | VKLNREDLLRKQRTFDNGSIPHQIHLGELHAILRRQEDFYPFLK |
| | | DNREKIEKILTFRIPYYVGPLARGNSRFAWMTRKSEETITPWNF |
| | | EEVVDKGASAQSFIERMTNFDKNLPNEKVLPKHSLLYEYFTVY |
| | | NELTKVKYVTEGMRKPAFLSGEQKKAIVDLLFKTNRKVTVKQ |
| | | LKEDYFKKIECFDSVEISGVEDRFNASLGTYHDLLKIIKDKDFL |
| | | DNEENEDILEDIVLTLTLFEDREMIEERLKTYAHLFDDKVMKQ |
| | | LKRRRYTGWGRLSRKLINGIRDKQSGKTILDFLKSDGFANRNF |
| | | MQLIHDDSLTFKEDIQKAQVSGQGDSLHEHIANLAGSPAIKKGI |
| | | LQTVKVVDELVKVMGRHKPENIVIEMARENQTTQKGQKNSRE |
| | | RMKRIEEGIKELGSQILKEHPVENTQLQNEKLYLYYLQNGRDM |
| | | YVDQELDINRLSDYDVDHIVPQSFLKDDSIDNKVLTRSDKNRG |
| | | KSDNVPSEEVVKKMKNYWRQLLNAKLITQRKFDNLTKAERG |
| | | GLSELDKAGFIKRQLVETRQITKHVAQILDSRMNTKYDENDKL |
| | | IREVKVITLKSKLVSDFRKDFQFYKVREINNYHHAHDAYLNAV |
| | | VGTALIKKYPKLESEFVYGDYKVYDVRKMIAKSEQEIGKATA |
| | | KYFFYSNIMNFFKTEITLANGEIRKRPLIETNGETGEIVWDKGR |
| | | DFATVRKVLSMPQVNIVKKTEVQTGGFSKESILPKRNSDKLIA |
| | | RKKDWDPKKYGGFDSPTVAYSVLVVAKVEKGKSKKLKSVKE |
| | | LLGITIMERSSFEKNPIDFLEAKGYKEVKKDLIIKLPKYSLFELE |
| | | NGRKRMLASAGELQKGNELALPSKYVNFLYLASHYEKLKGSP |
| | | EDNEQKQLFVEQHKHYLDEIIEQISEFSKRVILADANLDKVLSA |
| | | YNKHRDKPIREQAENIIHLFTLTNLGAPAAFKYFDTTIDRKRYT |
| | | STKEVLDATLIHQSITGLYETRIDLSQLGGD |
| 2287 | spCas9 | MDKKYSIGLDIGTNSVGWAVITDEYKVPSKKFKVLGNTDRHSI |
| | (H840A) | KKNLIGALLFDSGETAEATRLKRTARRRYTRRKNRICYLQEIFS |
| | Nickase | NEMAKVDDSFFHRLEESFLVEEDKKHERHPIFGNIVDEVAYHE |
| | | KYPTIYHLRKKLVDSTDKADLRLIYLALAHMIKFRGHFLIEGD |
| | | LNPDNSDVDKLFIQLVQTYNQLFEENPINASGVDAKAILSARLS |
| | | KSRRLENLIAQLPGEKKNGLFGNLIALSLGLTPNFKSNFDLAED |
| | | AKLQLSKDTYDDDLDNLLAQIGDQYADLFLAAKNLSDAILLS |
| | | DILRVNTEITKAPLSASMIKRYDEHHQDLTLLKALVRQQLPEK |
| | | YKEIFFDQSKNGYAGYIDGGASQEEFYKFIKPILEKMDGTEELL |
| | | VKLNREDLLRKQRTFDNGSIPHQIHLGELHAILRRQEDFYPFLK |
| | | DNREKIEKILTFRIPYYVGPLARGNSRFAWMTRKSEETITPWNF |
| | | EEVVDKGASAQSFIERMTNFDKNLPNEKVLPKHSLLYEYFTVY |
| | | NELTKVKYVTEGMRKPAFLSGEQKKAIVDLLFKTNRKVTVKQ |
| | | LKEDYFKKIECFDSVEISGVEDRFNASLGTYHDLLKIIKDKDFL |
| | | DNEENEDILEDIVLTLTLFEDREMIEERLKTYAHLFDDKVMKQ |
| | | LKRRRYTGWGRLSRKLINGIRDKQSGKTILDFLKSDGFANRNF |
| | | MQLIHDDSLTFKEDIQKAQVSGQGDSLHEHIANLAGSPAIKKGI |
| | | LQTVKVVDELVKVMGRHKPENIVIEMARENQTTQKGQKNSRE |
| | | RMKRIEEGIKELGSQILKEHPVENTQLQNEKLYLYYLQNGRDM |
| | | YVDQELDINRLSDYDVDAIVPQSFLKDDSIDNKVLTRSDKNRG |
| | | KSDNVPSEEVVKKMKNYWRQLLNAKLITQRKFDNLTKAERG |
| | | GLSELDKAGFIKRQLVETRQITKHVAQILDSRMNTKYDENDKL |
| | | IREVKVITLKSKLVSDFRKDFQFYKVREINNYHHAHDAYLNAV |
| | | VGTALIKKYPKLESEFVYGDYKVYDVRKMIAKSEQEIGKATA |
| | | KYFFYSNIMNFFKTEITLANGEIRKRPLIETNGETGEIVWDKGR |
| | | DFATVRKVLSMPQVNIVKKTEVQTGGFSKESILPKRNSDKLIA |
| | | RKKDWDPKKYGGFDSPTVAYSVLVVAKVEKGKSKKLKSVKE |
| | | LLGITIMERSSFEKNPIDFLEAKGYKEVKKDLIIKLPKYSLFELE |
| | | NGRKRMLASAGELQKGNELALPSKYVNFLYLASHYEKLKGSP |
| | | EDNEQKQLFVEQHKHYLDEIIEQISEFSKRVILADANLDKVLSA |
| | | YNKHRDKPIREQAENIIHLFTLTNLGAPAAFKYFDTTIDRKRYT |
| | | STKEVLDATLIHQSITGLYETRIDLSQLGGD |
| 2288 | Met(-) | DKKYSIGLDIGTNSVGWAVITDEYKVPSKKFKVLGNTDRHSIK |
| | spCas9 | KNLIGALLFDSGETAEATRLKRTARRRYTRRKNRICYLQEIFSN |
| | (H839A) | EMAKVDDSFFHRLEESFLVEEDKKHERHPIFGNIVDEVAYHEK |
| | Nickase | YPTIYHLRKKLVDSTDKADLRLIYLALAHMIKFRGHFLIEGDL |
| | | NPDNSDVDKLFIQLVQTYNQLFEENPINASGVDAKAILSARLS |
| | | KSRRLENLIAQLPGEKKNGLFGNLIALSLGLTPNFKSNFDLAED |
| | | AKLQLSKDTYDDDLDNLLAQIGDQYADLFLAAKNLSDAILLS |
| | | DILRVNTEITKAPLSASMIKRYDEHHQDLTLLKALVRQQLPEK |
| | | YKEIFFDQSKNGYAGYIDGGASQEEFYKFIKPILEKMDGTEELL |
| | | VKLNREDLLRKQRTFDNGSIPHQIHLGELHAILRRQEDFYPFLK |
| | | DNREKIEKILTFRIPYYVGPLARGNSRFAWMTRKSEETITPWNF |
| | | EEVVDKGASAQSFIERMTNFDKNLPNEKVLPKHSLLYEYFTVY |
| | | NELTKVKYVTEGMRKPAFLSGEQKKAIVDLLFKTNRKVTVKQ |
| | | LKEDYFKKIECFDSVEISGVEDRFNASLGTYHDLLKIIKDKDFL |
| | | DNEENEDILEDIVLTLTLFEDREMIEERLKTYAHLFDDKVMKQ |
| | | LKRRRYTGWGRLSRKLINGIRDKQSGKTILDFLKSDGFANRNF |
| | | MQLIHDDSLTFKEDIQKAQVSGQGDSLHEHIANLAGSPAIKKGI |
| | | LQTVKVVDELVKVMGRHKPENIVIEMARENQTTQKGQKNSRE |
| | | RMKRIEEGIKELGSQILKEHPVENTQLQNEKLYLYYLQNGRDM |
| | | YVDQELDINRLSDYDVDAIVPQSFLKDDSIDNKVLTRSDKNRG |
| | | KSDNVPSEEVVKKMKNYWRQLLNAKLITQRKFDNLTKAERG |
| | | GLSELDKAGFIKRQLVETRQITKHVAQILDSRMNTKYDENDKL |
| | | IREVKVITLKSKLVSDFRKDFQFYKVREINNYHHAHDAYLNAV |
| | | VGTALIKKYPKLESEFVYGDYKVYDVRKMIAKSEQEIGKATA |
| | | KYFFYSNIMNFFKTEITLANGEIRKRPLIETNGETGEIVWDKGR |
| | | DFATVRKVLSMPQVNIVKKTEVQTGGFSKESILPKRNSDKLIA |
| | | RKKDWDPKKYGGFDSPTVAYSVLVVAKVEKGKSKKLKSVKE |
| | | LLGITIMERSSFEKNPIDFLEAKGYKEVKKDLIIKLPKYSLFELE |
| | | NGRKRMLASAGELQKGNELALPSKYVNFLYLASHYEKLKGSP |
| | | EDNEQKQLFVEQHKHYLDEIIEQISEFSKRVILADANLDKVLSA |
| | | YNKHRDKPIREQAENIIHLFTLTNLGAPAAFKYFDTTIDRKRYT |
| | | STKEVLDATLIHQSITGLYETRIDLSQLGGD |
| 2286 | WT sluCas9 | MNQKFILGLDIGITSVGYGLIDYETKNIIDAGVRLFPEANVENN |
| | (recognized | EGRRSKRGSRRLKRRRIHRLERVKKLLEDYNLLDQSQIPQSTN |
| | NNGG | PYAIRVKGLSEALSKDELVIALLHIAKRRGIHKIDVIDSNDDVG |
| | PAM) | NELSTKEQLNKNSKLLKDKFVCQIQLERMNEGQVRGEKNRFK |
| | | TADIIKEIIQLLNVQKNFHQLDENFINKYIELVEMRREYFEGPG |
| | | KGSPYGWEGDPKAWYETLMGHCTYFPDELRSVKYAYSADLF |
| | | NALNDLNNLVIQRDGLSKLEYHEKYHIIENVFKQKKKPTLKQI |
| | | ANEINVNPEDIKGYRITKSGKPQFTEFKLYHDLKSVLFDQSILE |
| | | NEDVLDQIAEILTIYQDKDSIKSKLTELDILLNEEDKENIAQLTG |
| | | YTGTHRLSLKCIRLVLEEQWYSSRNQMEIFTHLNIKPKKINLTA |
| | | ANKIPKAMIDEFILSPVVKRTFGQAINLINKIIEKYGVPEDIIIELA |
| | | RENNSKDKQKFINEMQKKNENTRKRINEIIGKYGNQNAKRLV |
| | | EKIRLHDEQEGKCLYSLESIPLEDLLNNPNHYEVDHIIPRSVSFD |
| | | NSYHNKVLVKQSENSKKSNLTPYQYFNSGKSKLSYNQFKQHI |
| | | LNLSKSQDRISKKKKEYLLEERDINKFEVQKEFINRNLVDTRY |
| | | ATRELTNYLKAYFSANNMNVKVKTINGSFTDYLRKVWKFKK |
| | | ERNHGYKHHAEDALIIANADFLFKENKKLKAVNSVLEKPEIES |
| | | KQLDIQVDSEDNYSEMFIIPKQVQDIKDFRNFKYSHRVDKKPN |
| | | RQLINDTLYSTRKKDNSTYIVQTIKDIYAKDNTTLKKQFDKSPE |
| | | KFLMYQHDPRTFEKLEVIMKQYANEKNPLAKYHEETGEYLTK |
| | | YSKKNNGPIVKSLKYIGNKLGSHLDVTHQFKSSTKKLVKLSIK |
| | | PYRFDVYLTDKGYKFITISYLDVLKKDNYYYIPEQKYDKLKLG |
| | | KAIDKNAKFIASFYKNDLIKLDGEIYKIIGVNSDTRNMIELDLPD |
| | | IRYKEYCELNNIKGEPRIKKTIGKKVNSIEKLTTDVLGNVFTNT |
| | | QYTKPQLLFKRGN |
| 2290 | sluCas9 | MNQKFILGLDIGITSVGYGLIDYETKNIIDAGVRLFPEANVENN |
| | (N582A) | EGRRSKRGSRRLKRRRIHRLERVKKLLEDYNLLDQSQIPQSTN |
| | Nickase | PYAIRVKGLSEALSKDELVIALLHIAKRRGIHKIDVIDSNDDVG |
| | | NELSTKEQLNKNSKLLKDKFVCQIQLERMNEGQVRGEKNRFK |
| | | TADIIKEIIQLLNVQKNFHQLDENFINKYIELVEMRREYFEGPG |
| | | KGSPYGWEGDPKAWYETLMGHCTYFPDELRSVKYAYSADLF |
| | | NALNDLNNLVIQRDGLSKLEYHEKYHIIENVFKQKKKPTLKQI |
| | | ANEINVNPEDIKGYRITKSGKPQFTEFKLYHDLKSVLFDQSILE |
| | | NEDVLDQIAEILTIYQDKDSIKSKLTELDILLNEEDKENIAQLTG |
| | | YTGTHRLSLKCIRLVLEEQWYSSRNQMEIFTHLNIKPKKINLTA |
| | | ANKIPKAMIDEFILSPVVKRTFGQAINLINKIIEKYGVPEDIIIELA |
| | | RENNSKDKQKFINEMQKKNENTRKRINEIIGKYGNQNAKRLV |
| | | EKIRLHDEQEGKCLYSLESIPLEDLLNNPNHYEVDHIIPRSVSFD |
| | | NSYHNKVLVKQSEASKKSNLTPYQYFNSGKSKLSYNQFKQHI |
| | | LNLSKSQDRISKKKKEYLLEERDINKFEVQKEFINRNLVDTRY |
| | | ATRELTNYLKAYFSANNMNVKVKTINGSFTDYLRKVWKFKK |
| | | ERNHGYKHHAEDALIIANADFLFKENKKLKAVNSVLEKPEIES |
| | | KQLDIQVDSEDNYSEMFIIPKQVQDIKDFRNFKYSHRVDKKPN |
| | | RQLINDTLYSTRKKDNSTYIVQTIKDIYAKDNTTLKKQFDKSPE |
| | | KFLMYQHDPRTFEKLEVIMKQYANEKNPLAKYHEETGEYLTK |
| | | YSKKNNGPIVKSLKYIGNKLGSHLDVTHQFKSSTKKLVKLSIK |
| | | PYRFDVYLTDKGYKFITISYLDVLKKDNYYYIPEQKYDKLKLG |
| | | KAIDKNAKFIASFYKNDLIKLDGEIYKIIGVNSDTRNMIELDLPD |
| | | IRYKEYCELNNIKGEPRIKKTIGKKVNSIEKLTTDVLGNVFTNT |
| | | QYTKPQLLFKRGN |
| 2291 | Met(-) | NQKFILGLDIGITSVGYGLIDYETKNIIDAGVRLFPEANVENNE |
| | sluCas9 | GRRSKRGSRRLKRRRIHRLERVKKLLEDYNLLDQSQIPQSTNP |
| | ( )Nickase | YAIRVKGLSEALSKDELVIALLHIAKRRGIHKIDVIDSNDDVGN |
| | | ELSTKEQLNKNSKLLKDKFVCQIQLERMNEGQVRGEKNRFKT |
| | | ADIIKEIIQLLNVQKNFHQLDENFINKYIELVEMRREYFEGPGK |
| | | GSPYGWEGDPKAWYETLMGHCTYFPDELRSVKYAYSADLFN |
| | | ALNDLNNLVIQRDGLSKLEYHEKYHIIENVFKQKKKPTLKQIA |
| | | NEINVNPEDIKGYRITKSGKPQFTEFKLYHDLKSVLFDQSILEN |
| | | EDVLDQIAEILTIYQDKDSIKSKLTELDILLNEEDKENIAQLTGY |
| | | TGTHRLSLKCIRLVLEEQWYSSRNQMEIFTHLNIKPKKINLTAA |
| | | NKIPKAMIDEFILSPVVKRTFGQAINLINKIIEKYGVPEDIIIELAR |
| | | ENNSKDKQKFINEMQKKNENTRKRINEIIGKYGNQNAKRLVE |
| | | KIRLHDEQEGKCLYSLESIPLEDLLNNPNHYEVDHIIPRSVSFDN |
| | | SYHNKVLVKQSEASKKSNLTPYQYFNSGKSKLSYNQFKQHIL |
| | | NLSKSQDRISKKKKEYLLEERDINKFEVQKEFINRNLVDTRYA |
| | | TRELTNYLKAYFSANNMNVKVKTINGSFTDYLRKVWKFKKE |
| | | RNHGYKHHAEDALIIANADFLFKENKKLKAVNSVLEKPEIESK |
| | | QLDIQVDSEDNYSEMFIIPKQVQDIKDFRNFKYSHRVDKKPNR |
| | | QLINDTLYSTRKKDNSTYIVQTIKDIYAKDNTTLKKQFDKSPEK |
| | | FLMYQHDPRTFEKLEVIMKQYANEKNPLAKYHEETGEYLTKY |
| | | SKKNNGPIVKSLKYIGNKLGSHLDVTHQFKSSTKKLVKLSIKP |
| | | YRFDVYLTDKGYKFITISYLDVLKKDNYYYIPEQKYDKLKLGK |
| | | AIDKNAKFIASFYKNDLIKLDGEIYKIIGVNSDTRNMIELDLPDI |
| | | RYKEYCELNNIKGEPRIKKTIGKKVNSIEKLTTDVLGNVFTNTQ |
| | | YTKPQLLFKRGN |
| 2391 | Staphylococcus | MKRNYILGLDIGITSVGYGIIDYETRDVIDAGVRLFKEANVENN |
| | aureus | EGRRSKRGARRLKRRRRHRIQRVKKLLFDYNLLTDHSELSGIN |
| | Cas9 | PYEARVKGLSQKLSEEEFSAALLHLAKRRGVHNVNEVEEDTG |
| | (saCas9) | NELSTKEQISRNSKALEEKYVAELQLERLKKDGEVRGSINRFK |
| | | TSDYVKEAKQLLKVQKAYHQLDQSFIDTYIDLLETRRTYYEGP |
| | | GEGSPFGWKDIKEWYEMLMGHCTYFPEELRSVKYAYNADLY |
| | | NALNDLNNLVITRDENEKLEYYEKFQIIENVFKQKKKPTLKQI |
| | | AKEILVNEEDIKGYRVTSTGKPEFTNLKVYHDIKDITARKEIIEN |
| | | AELLDQIAKILTIYQSSEDIQEELTNLNSELTQEEIEQISNLKGYT |
| | | GTHNLSLKAINLILDELWHTNDNQIAIFNRLKLVPKKVDLSQQ |
| | | KEIPTTLVDDFILSPVVKRSFIQSIKVINAIIKKYGLPNDIIIELAR |
| | | EKNSKDAQKMINEMQKRNRQTNERIEEIIRTTGKENAKYLIEKI |
| | | KLHDMQEGKCLYSLEAIPLEDLLNNPFNYEVDHIIPRSVSFDNS |
| | | FNNKVLVKQEENSKKGNRTPFQYLSSSDSKISYETFKKHILNLA |
| | | KGKGRISKTKKEYLLEERDINRFSVQKDFINRNLVDTRYATRG |
| | | LMNLLRSYFRVNNLDVKVKSINGGFTSFLRRKWKFKKERNKG |
| | | YKHHAEDALIIANADFIFKEWKKLDKAKKVMENQMFEEKQA |
| | | ESMPEIETEQEYKEIFITPHQIKHIKDFKDYKYSHRVDKKPNRE |
| | | LINDTLYSTRKDDKGNTLIVNNLNGLYDKDNDKLKKLINKSPE |
| | | KLLMYHHDPQTYQKLKLIMEQYGDEKNPLYKYYEETGNYLT |
| | | KYSKKDNGPVIKKIKYYGNKLNAHLDITDDYPNSRNKVVKLS |
| | | LKPYRFDVYLDNGVYKFVTVKNLDVIKKENYYEVNSKCYEEA |
| | | KKLKKISNQAEFIASFYNNDLIKINGELYRVIGVNNDLLNRIEV |
| | | NMIDITYREYLENMNDKRPPRIIKTIASKTQSIKKYSTDILGNLY |
| | | EVKSKKHPQIIKKG |
| 2392 | saCas9 | MKRNYILGLDIGITSVGYGIIDYETRDVIDAGVRLFKEANVENN |
| | (N580A) | EGRRSKRGARRLKRRRRHRIQRVKKLLFDYNLLTDHSELSGIN |
| | Nickase | PYEARVKGLSQKLSEEEFSAALLHLAKRRGVHNVNEVEEDTG |
| | | NELSTKEQISRNSKALEEKYVAELQLERLKKDGEVRGSINRFK |
| | | TSDYVKEAKQLLKVQKAYHQLDQSFIDTYIDLLETRRTYYEGP |
| | | GEGSPFGWKDIKEWYEMLMGHCTYFPEELRSVKYAYNADLY |
| | | NALNDLNNLVITRDENEKLEYYEKFQIIENVFKQKKKPTLKQI |
| | | AKEILVNEEDIKGYRVTSTGKPEFTNLKVYHDIKDITARKEIIEN |
| | | AELLDQIAKILTIYQSSEDIQEELTNLNSELTQEEIEQISNLKGYT |
| | | GTHNLSLKAINLILDELWHTNDNQIAIFNRLKLVPKKVDLSQQ |
| | | KEIPTTLVDDFILSPVVKRSFIQSIKVINAIIKKYGLPNDIIIELAR |
| | | EKNSKDAQKMINEMQKRNRQTNERIEEIIRTTGKENAKYLIEKI |
| | | KLHDMQEGKCLYSLEAIPLEDLLNNPFNYEVDHIIPRSVSFDNS |
| | | FNNKVLVKQEEASKKGNRTPFQYLSSSDSKISYETFKKHILNLA |
| | | KGKGRISKTKKEYLLEERDINRFSVQKDFINRNLVDTRYATRG |
| | | LMNLLRSYFRVNNLDVKVKSINGGFTSFLRRKWKFKKERNKG |
| | | YKHHAEDALIIANADFIFKEWKKLDKAKKVMENQMFEEKQA |
| | | ESMPEIETEQEYKEIFITPHQIKHIKDFKDYKYSHRVDKKPNRE |
| | | LINDTLYSTRKDDKGNTLIVNNLNGLYDKDNDKLKKLINKSPE |
| | | KLLMYHHDPQTYQKLKLIMEQYGDEKNPLYKYYEETGNYLT |
| | | KYSKKDNGPVIKKIKYYGNKLNAHLDITDDYPNSRNKVVKLS |
| | | LKPYRFDVYLDNGVYKFVTVKNLDVIKKENYYEVNSKCYEEA |
| | | KKLKKISNQAEFIASFYNNDLIKINGELYRVIGVNNDLLNRIEV |
| | | NMIDITYREYLENMNDKRPPRIIKTIASKTQSIKKYSTDILGNLY |
| | | EVKSKKHPQIIKKG |
| 2393 | Met(-) | KRNYILGLDIGITSVGYGIIDYETRDVIDAGVRLFKEANVENNE |
| | saCas9 | GRRSKRGARRLKRRRRHRIQRVKKLLFDYNLLTDHSELSGINP |
| | (N579A) | YEARVKGLSQKLSEEEFSAALLHLAKRRGVHNVNEVEEDTGN |
| | Nickase | ELSTKEQISRNSKALEEKYVAELQLERLKKDGEVRGSINRFKTS |
| | | DYVKEAKQLLKVQKAYHQLDQSFIDTYIDLLETRRTYYEGPG |
| | | EGSPFGWKDIKEWYEMLMGHCTYFPEELRSVKYAYNADLYN |
| | | ALNDLNNLVITRDENEKLEYYEKFQIIENVFKQKKKPTLKQIA |
| | | KEILVNEEDIKGYRVTSTGKPEFTNLKVYHDIKDITARKEIIENA |
| | | ELLDQIAKILTIYQSSEDIQEELTNLNSELTQEEIEQISNLKGYTG |
| | | THNLSLKAINLILDELWHTNDNQIAIFNRLKLVPKKVDLSQQK |
| | | EIPTTLVDDFILSPVVKRSFIQSIKVINAIIKKYGLPNDIIIELARE |
| | | KNSKDAQKMINEMQKRNRQTNERIEEIIRTTGKENAKYLIEKIK |
| | | LHDMQEGKCLYSLEAIPLEDLLNNPFNYEVDHIIPRSVSFDNSF |
| | | NNKVLVKQEEASKKGNRTPFQYLSSSDSKISYETFKKHILNLA |
| | | KGKGRISKTKKEYLLEERDINRFSVQKDFINRNLVDTRYATRG |
| | | LMNLLRSYFRVNNLDVKVKSINGGFTSFLRRKWKFKKERNKG |
| | | YKHHAEDALIIANADFIFKEWKKLDKAKKVMENQMFEEKQA |
| | | ESMPEIETEQEYKEIFITPHQIKHIKDFKDYKYSHRVDKKPNRE |
| | | LINDTLYSTRKDDKGNTLIVNNLNGLYDKDNDKLKKLINKSPE |
| | | KLLMYHHDPQTYQKLKLIMEQYGDEKNPLYKYYEETGNYLT |
| | | KYSKKDNGPVIKKIKYYGNKLNAHLDITDDYPNSRNKVVKLS |
| | | LKPYRFDVYLDNGVYKFVTVKNLDVIKKENYYEVNSKCYEEA |
| | | KKLKKISNQAEFIASFYNNDLIKINGELYRVIGVNNDLLNRIEV |
| | | NMIDITYREYLENMNDKRPPRIIKTIASKTQSIKKYSTDILGNLY |
| | | EVKSKKHPQIIKKG |
| 2292 | spCas9-NG | MDKKYSIGLDIGTNSVGWAVITDEYKVPSKKFKVLGNTDRHSI |
| | | KKNLIGALLFDSGETAEATRLKRTARRRYTRRKNRICYLQEIFS |
| | | NEMAKVDDSFFHRLEESFLVEEDKKHERHPIFGNIVDEVAYHE |
| | | KYPTIYHLRKKLVDSTDKADLRLIYLALAHMIKFRGHFLIEGD |
| | | LNPDNSDVDKLFIQLVQTYNQLFEENPINASGVDAKAILSARLS |
| | | KSRRLENLIAQLPGEKKNGLFGNLIALSLGLTPNFKSNFDLAED |
| | | AKLQLSKDTYDDDLDNLLAQIGDQYADLFLAAKNLSDAILLS |
| | | DILRVNTEITKAPLSASMIKRYDEHHQDLTLLKALVRQQLPEK |
| | | YKEIFFDQSKNGYAGYIDGGASQEEFYKFIKPILEKMDGTEELL |
| | | VKLNREDLLRKQRTFDNGSIPHQIHLGELHAILRRQEDFYPFLK |
| | | DNREKIEKILTFRIPYYVGPLARGNSRFAWMTRKSEETITPWNF |
| | | EEVVDKGASAQSFIERMTNFDKNLPNEKVLPKHSLLYEYFTVY |
| | | NELTKVKYVTEGMRKPAFLSGEQKKAIVDLLFKTNRKVTVKQ |
| | | LKEDYFKKIECFDSVEISGVEDRFNASLGTYHDLLKIIKDKDFL |
| | | DNEENEDILEDIVLTLTLFEDREMIEERLKTYAHLFDDKVMKQ |
| | | LKRRRYTGWGRLSRKLINGIRDKQSGKTILDFLKSDGFANRNF |
| | | MQLIHDDSLTFKEDIQKAQVSGQGDSLHEHIANLAGSPAIKKGI |
| | | LQTVKVVDELVKVMGRHKPENIVIEMARENQTTQKGQKNSRE |
| | | RMKRIEEGIKELGSQILKEHPVENTQLQNEKLYLYYLQNGRDM |
| | | YVDQELDINRLSDYDVDHIVPQSFLKDDSIDNKVLTRSDKNRG |
| | | KSDNVPSEEVVKKMKNYWRQLLNAKLITQRKFDNLTKAERG |
| | | GLSELDKAGFIKRQLVETRQITKHVAQILDSRMNTKYDENDKL |
| | | IREVKVITLKSKLVSDFRKDFQFYKVREINNYHHAHDAYLNAV |
| | | VGTALIKKYPKLESEFVYGDYKVYDVRKMIAKSEQEIGKATA |
| | | KYFFYSNIMNFFKTEITLANGEIRKRPLIETNGETGEIVWDKGR |
| | | DFATVRKVLSMPQVNIVKKTEVQTGGFSKESIRPKRNSDKLIA |
| | | RKKDWDPKKYGGFVSPTVAYSVLVVAKVEKGKSKKLKSVKE |
| | | LLGITIMERSSFEKNPIDFLEAKGYKEVKKDLIIKLPKYSLFELE |
| | | NGRKRMLASARFLQKGNELALPSKYVNFLYLASHYEKLKGSP |
| | | EDNEQKQLFVEQHKHYLDEIIEQISEFSKRVILADANLDKVLSA |
| | | YNKHRDKPIREQAENIIHLFTLTNLGAPRAFKYFDTTIDRKVYR |
| | | STKEVLDATLIHQSITGLYETRIDLSQLGGD |
| 2293 | spCas9-NG | MDKKYSIGLDIGTNSVGWAVITDEYKVPSKKFKVLGNTDRHSI |
| | (H840A) | KKNLIGALLFDSGETAEATRLKRTARRRYTRRKNRICYLQEIFS |
| | Nickase | NEMAKVDDSFFHRLEESFLVEEDKKHERHPIFGNIVDEVAYHE |
| | | KYPTIYHLRKKLVDSTDKADLRLIYLALAHMIKFRGHFLIEGD |
| | | LNPDNSDVDKLFIQLVQTYNQLFEENPINASGVDAKAILSARLS |
| | | KSRRLENLIAQLPGEKKNGLFGNLIALSLGLTPNFKSNFDLAED |
| | | AKLQLSKDTYDDDLDNLLAQIGDQYADLFLAAKNLSDAILLS |
| | | DILRVNTEITKAPLSASMIKRYDEHHQDLTLLKALVRQQLPEK |
| | | YKEIFFDQSKNGYAGYIDGGASQEEFYKFIKPILEKMDGTEELL |
| | | VKLNREDLLRKQRTFDNGSIPHQIHLGELHAILRRQEDFYPFLK |
| | | DNREKIEKILTFRIPYYVGPLARGNSRFAWMTRKSEETITPWNF |
| | | EEVVDKGASAQSFIERMTNFDKNLPNEKVLPKHSLLYEYFTVY |
| | | NELTKVKYVTEGMRKPAFLSGEQKKAIVDLLFKTNRKVTVKQ |
| | | LKEDYFKKIECFDSVEISGVEDRFNASLGTYHDLLKIIKDKDFL |
| | | DNEENEDILEDIVLTLTLFEDREMIEERLKTYAHLFDDKVMKQ |
| | | LKRRRYTGWGRLSRKLINGIRDKQSGKTILDFLKSDGFANRNF |
| | | MQLIHDDSLTFKEDIQKAQVSGQGDSLHEHIANLAGSPAIKKGI |
| | | LQTVKVVDELVKVMGRHKPENIVIEMARENQTTQKGQKNSRE |
| | | RMKRIEEGIKELGSQILKEHPVENTQLQNEKLYLYYLQNGRDM |
| | | YVDQELDINRLSDYDVDAIVPQSFLKDDSIDNKVLTRSDKNRG |
| | | KSDNVPSEEVVKKMKNYWRQLLNAKLITQRKFDNLTKAERG |
| | | GLSELDKAGFIKRQLVETRQITKHVAQILDSRMNTKYDENDKL |
| | | IREVKVITLKSKLVSDFRKDFQFYKVREINNYHHAHDAYLNAV |
| | | VGTALIKKYPKLESEFVYGDYKVYDVRKMIAKSEQEIGKATA |
| | | KYFFYSNIMNFFKTEITLANGEIRKRPLIETNGETGEIVWDKGR |
| | | DFATVRKVLSMPQVNIVKKTEVQTGGFSKESIRPKRNSDKLIA |
| | | RKKDWDPKKYGGFVSPTVAYSVLVVAKVEKGKSKKLKSVKE |
| | | LLGITIMERSSFEKNPIDFLEAKGYKEVKKDLIIKLPKYSLFELE |
| | | NGRKRMLASARFLQKGNELALPSKYVNFLYLASHYEKLKGSP |
| | | EDNEQKQLFVEQHKHYLDEIIEQISEFSKRVILADANLDKVLSA |
| | | YNKHRDKPIREQAENIIHLFTLTNLGAPRAFKYFDTTIDRKVYR |
| | | STKEVLDATLIHQSITGLYETRIDLSQLGGD |
| 2294 | spCas9-NG | DKKYSIGLDIGTNSVGWAVITDEYKVPSKKFKVLGNTDRHSIK |
| | (H840A) | KNLIGALLFDSGETAEATRLKRTARRRYTRRKNRICYLQEIFSN |
| | Nickase | EMAKVDDSFFHRLEESFLVEEDKKHERHPIFGNIVDEVAYHEK |
| | | YPTIYHLRKKLVDSTDKADLRLIYLALAHMIKFRGHFLIEGDL |
| | | NPDNSDVDKLFIQLVQTYNQLFEENPINASGVDAKAILSARLS |
| | | KSRRLENLIAQLPGEKKNGLFGNLIALSLGLTPNFKSNFDLAED |
| | | AKLQLSKDTYDDDLDNLLAQIGDQYADLFLAAKNLSDAILLS |
| | | DILRVNTEITKAPLSASMIKRYDEHHQDLTLLKALVRQQLPEK |
| | | YKEIFFDQSKNGYAGYIDGGASQEEFYKFIKPILEKMDGTEELL |
| | | VKLNREDLLRKQRTFDNGSIPHQIHLGELHAILRRQEDFYPFLK |
| | | DNREKIEKILTFRIPYYVGPLARGNSRFAWMTRKSEETITPWNF |
| | | EEVVDKGASAQSFIERMTNFDKNLPNEKVLPKHSLLYEYFTVY |
| | | NELTKVKYVTEGMRKPAFLSGEQKKAIVDLLFKTNRKVTVKQ |
| | | LKEDYFKKIECFDSVEISGVEDRFNASLGTYHDLLKIIKDKDFL |
| | | DNEENEDILEDIVLTLTLFEDREMIEERLKTYAHLFDDKVMKQ |
| | | LKRRRYTGWGRLSRKLINGIRDKQSGKTILDFLKSDGFANRNF |
| | | MQLIHDDSLTFKEDIQKAQVSGQGDSLHEHIANLAGSPAIKKGI |
| | | LQTVKVVDELVKVMGRHKPENIVIEMARENQTTQKGQKNSRE |
| | | RMKRIEEGIKELGSQILKEHPVENTQLQNEKLYLYYLQNGRDM |
| | | YVDQELDINRLSDYDVDAIVPQSFLKDDSIDNKVLTRSDKNRG |
| | | KSDNVPSEEVVKKMKNYWRQLLNAKLITQRKFDNLTKAERG |
| | | GLSELDKAGFIKRQLVETRQITKHVAQILDSRMNTKYDENDKL |
| | | IREVKVITLKSKLVSDFRKDFQFYKVREINNYHHAHDAYLNAV |
| | | VGTALIKKYPKLESEFVYGDYKVYDVRKMIAKSEQEIGKATA |
| | | KYFFYSNIMNFFKTEITLANGEIRKRPLIETNGETGEIVWDKGR |
| | | DFATVRKVLSMPQVNIVKKTEVQTGGFSKESIRPKRNSDKLIA |
| | | RKKDWDPKKYGGFVSPTVAYSVLVVAKVEKGKSKKLKSVKE |
| | | LLGITIMERSSFEKNPIDFLEAKGYKEVKKDLIIKLPKYSLFELE |
| | | NGRKRMLASARFLQKGNELALPSKYVNFLYLASHYEKLKGSP |
| | | EDNEQKQLFVEQHKHYLDEIIEQISEFSKRVILADANLDKVLSA |
| | | YNKHRDKPIREQAENIIHLFTLTNLGAPRAFKYFDTTIDRKVYR |
| | | STKEVLDATLIHQSITGLYETRIDLSQLGGD |
| 2295 | spCas9- | MDKKYSIGLDIGTNSVGWAVITDEYKVPSKKFKVLGNTDRHSI |
| | VRQR | KKNLIGALLFDSGETAEATRLKRTARRRYTRRKNRICYLQEIFS |
| | | NEMAKVDDSFFHRLEESFLVEEDKKHERHPIFGNIVDEVAYHE |
| | | KYPTIYHLRKKLVDSTDKADLRLIYLALAHMIKFRGHFLIEGD |
| | | LNPDNSDVDKLFIQLVQTYNQLFEENPINASGVDAKAILSARLS |
| | | KSRRLENLIAQLPGEKKNGLFGNLIALSLGLTPNFKSNFDLAED |
| | | AKLQLSKDTYDDDLDNLLAQIGDQYADLFLAAKNLSDAILLS |
| | | DILRVNTEITKAPLSASMIKRYDEHHQDLTLLKALVRQQLPEK |
| | | YKEIFFDQSKNGYAGYIDGGASQEEFYKFIKPILEKMDGTEELL |
| | | VKLNREDLLRKQRTFDNGSIPHQIHLGELHAILRRQEDFYPFLK |
| | | DNREKIEKILTFRIPYYVGPLARGNSRFAWMTRKSEETITPWNF |
| | | EEVVDKGASAQSFIERMTNFDKNLPNEKVLPKHSLLYEYFTVY |
| | | NELTKVKYVTEGMRKPAFLSGEQKKAIVDLLFKTNRKVTVKQ |
| | | LKEDYFKKIECFDSVEISGVEDRFNASLGTYHDLLKIIKDKDFL |
| | | DNEENEDILEDIVLTLTLFEDREMIEERLKTYAHLFDDKVMKQ |
| | | LKRRRYTGWGRLSRKLINGIRDKQSGKTILDFLKSDGFANRNF |
| | | MQLIHDDSLTFKEDIQKAQVSGQGDSLHEHIANLAGSPAIKKGI |
| | | LQTVKVVDELVKVMGRHKPENIVIEMARENQTTQKGQKNSRE |
| | | RMKRIEEGIKELGSQILKEHPVENTQLQNEKLYLYYLQNGRDM |
| | | YVDQELDINRLSDYDVDHIVPQSFLKDDSIDNKVLTRSDKNRG |
| | | KSDNVPSEEVVKKMKNYWRQLLNAKLITQRKFDNLTKAERG |
| | | GLSELDKAGFIKRQLVETRQITKHVAQILDSRMNTKYDENDKL |
| | | IREVKVITLKSKLVSDFRKDFQFYKVREINNYHHAHDAYLNAV |
| | | VGTALIKKYPKLESEFVYGDYKVYDVRKMIAKSEQEIGKATA |
| | | KYFFYSNIMNFFKTEITLANGEIRKRPLIETNGETGEIVWDKGR |
| | | DFATVRKVLSMPQVNIVKKTEVQTGGFSKESILPKRNSDKLIA |
| | | RKKDWDPKKYGGFVSPTVAYSVLVVAKVEKGKSKKLKSVKE |
| | | LLGITIMERSSFEKNPIDFLEAKGYKEVKKDLIIKLPKYSLFELE |
| | | NGRKRMLASARELQKGNELALPSKYVNFLYLASHYEKLKGSP |
| | | EDNEQKQLFVEQHKHYLDEIIEQISEFSKRVILADANLDKVLSA |
| | | YNKHRDKPIREQAENIIHLFTLTNLGAPAAFKYFDTTIDRKQYR |
| | | STKEVLDATLIHQSITGLYETRIDLSQLGGD |
| 2296 | spCas9- | MDKKYSIGLDIGTNSVGWAVITDEYKVPSKKFKVLGNTDRHSI |
| | VRQR | KKNLIGALLFDSGETAEATRLKRTARRRYTRRKNRICYLQEIFS |
| | (H840A) | NEMAKVDDSFFHRLEESFLVEEDKKHERHPIFGNIVDEVAYHE |
| | Nickase | KYPTIYHLRKKLVDSTDKADLRLIYLALAHMIKFRGHFLIEGD |
| | | LNPDNSDVDKLFIQLVQTYNQLFEENPINASGVDAKAILSARLS |
| | | KSRRLENLIAQLPGEKKNGLFGNLIALSLGLTPNFKSNFDLAED |
| | | AKLQLSKDTYDDDLDNLLAQIGDQYADLFLAAKNLSDAILLS |
| | | DILRVNTEITKAPLSASMIKRYDEHHQDLTLLKALVRQQLPEK |
| | | YKEIFFDQSKNGYAGYIDGGASQEEFYKFIKPILEKMDGTEELL |
| | | VKLNREDLLRKQRTFDNGSIPHQIHLGELHAILRRQEDFYPFLK |
| | | DNREKIEKILTFRIPYYVGPLARGNSRFAWMTRKSEETITPWNF |
| | | EEVVDKGASAQSFIERMTNFDKNLPNEKVLPKHSLLYEYFTVY |
| | | NELTKVKYVTEGMRKPAFLSGEQKKAIVDLLFKTNRKVTVKQ |
| | | LKEDYFKKIECFDSVEISGVEDRFNASLGTYHDLLKIIKDKDFL |
| | | DNEENEDILEDIVLTLTLFEDREMIEERLKTYAHLFDDKVMKQ |
| | | LKRRRYTGWGRLSRKLINGIRDKQSGKTILDFLKSDGFANRNF |
| | | MQLIHDDSLTFKEDIQKAQVSGQGDSLHEHIANLAGSPAIKKGI |
| | | LQTVKVVDELVKVMGRHKPENIVIEMARENQTTQKGQKNSRE |
| | | RMKRIEEGIKELGSQILKEHPVENTQLQNEKLYLYYLQNGRDM |
| | | YVDQELDINRLSDYDVDAIVPQSFLKDDSIDNKVLTRSDKNRG |
| | | KSDNVPSEEVVKKMKNYWRQLLNAKLITQRKFDNLTKAERG |
| | | GLSELDKAGFIKRQLVETRQITKHVAQILDSRMNTKYDENDKL |
| | | IREVKVITLKSKLVSDFRKDFQFYKVREINNYHHAHDAYLNAV |
| | | VGTALIKKYPKLESEFVYGDYKVYDVRKMIAKSEQEIGKATA |
| | | KYFFYSNIMNFFKTEITLANGEIRKRPLIETNGETGEIVWDKGR |
| | | DFATVRKVLSMPQVNIVKKTEVQTGGFSKESILPKRNSDKLIA |
| | | RKKDWDPKKYGGFVSPTVAYSVLVVAKVEKGKSKKLKSVKE |
| | | LLGITIMERSSFEKNPIDFLEAKGYKEVKKDLIIKLPKYSLFELE |
| | | NGRKRMLASARELQKGNELALPSKYVNFLYLASHYEKLKGSP |
| | | EDNEQKQLFVEQHKHYLDEIIEQISEFSKRVILADANLDKVLSA |
| | | YNKHRDKPIREQAENIIHLFTLTNLGAPAAFKYFDTTIDRKQYR |
| | | STKEVLDATLIHQSITGLYETRIDLSQLGGD |
| 2297 | Met(-) | DKKYSIGLDIGTNSVGWAVITDEYKVPSKKFKVLGNTDRHSIK |
| | spCas9- | KNLIGALLFDSGETAEATRLKRTARRRYTRRKNRICYLQEIFSN |
| | VRQR | EMAKVDDSFFHRLEESFLVEEDKKHERHPIFGNIVDEVAYHEK |
| | (H839A) | YPTIYHLRKKLVDSTDKADLRLIYLALAHMIKFRGHFLIEGDL |
| | Nickase | NPDNSDVDKLFIQLVQTYNQLFEENPINASGVDAKAILSARLS |
| | | KSRRLENLIAQLPGEKKNGLFGNLIALSLGLTPNFKSNFDLAED |
| | | AKLQLSKDTYDDDLDNLLAQIGDQYADLFLAAKNLSDAILLS |
| | | DILRVNTEITKAPLSASMIKRYDEHHQDLTLLKALVRQQLPEK |
| | | YKEIFFDQSKNGYAGYIDGGASQEEFYKFIKPILEKMDGTEELL |
| | | VKLNREDLLRKQRTFDNGSIPHQIHLGELHAILRRQEDFYPFLK |
| | | DNREKIEKILTFRIPYYVGPLARGNSRFAWMTRKSEETITPWNF |
| | | EEVVDKGASAQSFIERMTNFDKNLPNEKVLPKHSLLYEYFTVY |
| | | NELTKVKYVTEGMRKPAFLSGEQKKAIVDLLFKTNRKVTVKQ |
| | | LKEDYFKKIECFDSVEISGVEDRFNASLGTYHDLLKIIKDKDFL |
| | | DNEENEDILEDIVLTLTLFEDREMIEERLKTYAHLFDDKVMKQ |
| | | LKRRRYTGWGRLSRKLINGIRDKQSGKTILDFLKSDGFANRNF |
| | | MQLIHDDSLTFKEDIQKAQVSGQGDSLHEHIANLAGSPAIKKGI |
| | | LQTVKVVDELVKVMGRHKPENIVIEMARENQTTQKGQKNSRE |
| | | RMKRIEEGIKELGSQILKEHPVENTQLQNEKLYLYYLQNGRDM |
| | | YVDQELDINRLSDYDVDAIVPQSFLKDDSIDNKVLTRSDKNRG |
| | | KSDNVPSEEVVKKMKNYWRQLLNAKLITQRKFDNLTKAERG |
| | | GLSELDKAGFIKRQLVETRQITKHVAQILDSRMNTKYDENDKL |
| | | IREVKVITLKSKLVSDFRKDFQFYKVREINNYHHAHDAYLNAV |
| | | VGTALIKKYPKLESEFVYGDYKVYDVRKMIAKSEQEIGKATA |
| | | KYFFYSNIMNFFKTEITLANGEIRKRPLIETNGETGEIVWDKGR |
| | | DFATVRKVLSMPQVNIVKKTEVQTGGFSKESILPKRNSDKLIA |
| | | RKKDWDPKKYGGFVSPTVAYSVLVVAKVEKGKSKKLKSVKE |
| | | LLGITIMERSSFEKNPIDFLEAKGYKEVKKDLIIKLPKYSLFELE |
| | | NGRKRMLASARELQKGNELALPSKYVNFLYLASHYEKLKGSP |
| | | EDNEQKQLFVEQHKHYLDEIIEQISEFSKRVILADANLDKVLSA |
| | | YNKHRDKPIREQAENIIHLFTLTNLGAPAAFKYFDTTIDRKQYR |
| | | STKEVLDATLIHQSITGLYETRIDLSQLGGD |
| 2298 | SpRY Cas9 | MDKKYSIGLDIGTNSVGWAVITDEYKVPSKKFKVLGNTDRHSI |
| | | KKNLIGALLFDSGETAERTRLKRTARRRYTRRKNRICYLQEIFS |
| | | NEMAKVDDSFFHRLEESFLVEEDKKHERHPIFGNIVDEVAYHE |
| | | KYPTIYHLRKKLVDSTDKADLRLIYLALAHMIKFRGHFLIEGD |
| | | LNPDNSDVDKLFIQLVQTYNQLFEENPINASGVDAKAILSARLS |
| | | KSRRLENLIAQLPGEKKNGLFGNLIALSLGLTPNFKSNFDLAED |
| | | AKLQLSKDTYDDDLDNLLAQIGDQYADLFLAAKNLSDAILLS |
| | | DILRVNTEITKAPLSASMIKRYDEHHQDLTLLKALVRQQLPEK |
| | | YKEIFFDQSKNGYAGYIDGGASQEEFYKFIKPILEKMDGTEELL |
| | | VKLNREDLLRKQRTFDNGSIPHQIHLGELHAILRRQEDFYPFLK |
| | | DNREKIEKILTFRIPYYVGPLARGNSRFAWMTRKSEETITPWNF |
| | | EEVVDKGASAQSFIERMTNFDKNLPNEKVLPKHSLLYEYFTVY |
| | | NELTKVKYVTEGMRKPAFLSGEQKKAIVDLLFKTNRKVTVKQ |
| | | LKEDYFKKIECFDSVEISGVEDRFNASLGTYHDLLKIIKDKDFL |
| | | DNEENEDILEDIVLTLTLFEDREMIEERLKTYAHLFDDKVMKQ |
| | | LKRRRYTGWGRLSRKLINGIRDKQSGKTILDFLKSDGFANRNF |
| | | MQLIHDDSLTFKEDIQKAQVSGQGDSLHEHIANLAGSPAIKKGI |
| | | LQTVKVVDELVKVMGRHKPENIVIEMARENQTTQKGQKNSRE |
| | | RMKRIEEGIKELGSQILKEHPVENTQLQNEKLYLYYLQNGRDM |
| | | YVDQELDINRLSDYDVDHIVPQSFLKDDSIDNKVLTRSDKNRG |
| | | KSDNVPSEEVVKKMKNYWRQLLNAKLITQRKFDNLTKAERG |
| | | GLSELDKAGFIKRQLVETRQITKHVAQILDSRMNTKYDENDKL |
| | | IREVKVITLKSKLVSDFRKDFQFYKVREINNYHHAHDAYLNAV |
| | | VGTALIKKYPKLESEFVYGDYKVYDVRKMIAKSEQEIGKATA |
| | | KYFFYSNIMNFFKTEITLANGEIRKRPLIETNGETGEIVWDKGR |
| | | DFATVRKVLSMPQVNIVKKTEVQTGGFSKESIRPKRNSDKLIA |
| | | RKKDWDPKKYGGFLWPTVAYSVLVVAKVEKGKSKKLKSVK |
| | | ELLGITIMERSSFEKNPIDFLEAKGYKEVKKDLIIKLPKYSLFEL |
| | | ENGRKRMLASAKQLQKGNELALPSKYVNFLYLASHYEKLKGS |
| | | PEDNEQKQLFVEQHKHYLDEIIEQISEFSKRVILADANLDKVLS |
| | | AYNKHRDKPIREQAENIIHLFTLTRLGAPRAFKYFDTTIDPKQY |
| | | RSTKEVLDATLIHQSITGLYETRIDLSQLGGD |
| 2299 | SpRY | MDKKYSIGLDIGTNSVGWAVITDEYKVPSKKFKVLGNTDRHSI |
| | (H840A) | KKNLIGALLFDSGETAERTRLKRTARRRYTRRKNRICYLQEIFS |
| | Nickase | NEMAKVDDSFFHRLEESFLVEEDKKHERHPIFGNIVDEVAYHE |
| | | KYPTIYHLRKKLVDSTDKADLRLIYLALAHMIKFRGHFLIEGD |
| | | LNPDNSDVDKLFIQLVQTYNQLFEENPINASGVDAKAILSARLS |
| | | KSRRLENLIAQLPGEKKNGLFGNLIALSLGLTPNFKSNFDLAED |
| | | AKLQLSKDTYDDDLDNLLAQIGDQYADLFLAAKNLSDAILLS |
| | | DILRVNTEITKAPLSASMIKRYDEHHQDLTLLKALVRQQLPEK |
| | | YKEIFFDQSKNGYAGYIDGGASQEEFYKFIKPILEKMDGTEELL |
| | | VKLNREDLLRKQRTFDNGSIPHQIHLGELHAILRRQEDFYPFLK |
| | | DNREKIEKILTFRIPYYVGPLARGNSRFAWMTRKSEETITPWNF |
| | | EEVVDKGASAQSFIERMTNFDKNLPNEKVLPKHSLLYEYFTVY |
| | | NELTKVKYVTEGMRKPAFLSGEQKKAIVDLLFKTNRKVTVKQ |
| | | LKEDYFKKIECFDSVEISGVEDRFNASLGTYHDLLKIIKDKDFL |
| | | DNEENEDILEDIVLTLTLFEDREMIEERLKTYAHLFDDKVMKQ |
| | | LKRRRYTGWGRLSRKLINGIRDKQSGKTILDFLKSDGFANRNF |
| | | MQLIHDDSLTFKEDIQKAQVSGQGDSLHEHIANLAGSPAIKKGI |
| | | LQTVKVVDELVKVMGRHKPENIVIEMARENQTTQKGQKNSRE |
| | | RMKRIEEGIKELGSQILKEHPVENTQLQNEKLYLYYLQNGRDM |
| | | YVDQELDINRLSDYDVDAIVPQSFLKDDSIDNKVLTRSDKNRG |
| | | KSDNVPSEEVVKKMKNYWRQLLNAKLITQRKFDNLTKAERG |
| | | GLSELDKAGFIKRQLVETRQITKHVAQILDSRMNTKYDENDKL |
| | | IREVKVITLKSKLVSDFRKDFQFYKVREINNYHHAHDAYLNAV |
| | | VGTALIKKYPKLESEFVYGDYKVYDVRKMIAKSEQEIGKATA |
| | | KYFFYSNIMNFFKTEITLANGEIRKRPLIETNGETGEIVWDKGR |
| | | DFATVRKVLSMPQVNIVKKTEVQTGGFSKESIRPKRNSDKLIA |
| | | RKKDWDPKKYGGFLWPTVAYSVLVVAKVEKGKSKKLKSVK |
| | | ELLGITIMERSSFEKNPIDFLEAKGYKEVKKDLIIKLPKYSLFEL |
| | | ENGRKRMLASAKQLQKGNELALPSKYVNFLYLASHYEKLKGS |
| | | PEDNEQKQLFVEQHKHYLDEIIEQISEFSKRVILADANLDKVLS |
| | | AYNKHRDKPIREQAENIIHLFTLTRLGAPRAFKYFDTTIDPKQY |
| | | RSTKEVLDATLIHQSITGLYETRIDLSQLGGD |
| 2300 | Met(-) | DKKYSIGLDIGTNSVGWAVITDEYKVPSKKFKVLGNTDRHSIK |
| | SpRY | KNLIGALLFDSGETAERTRLKRTARRRYTRRKNRICYLQEIFSN |
| | (H839A) | EMAKVDDSFFHRLEESFLVEEDKKHERHPIFGNIVDEVAYHEK |
| | Cas9 | YPTIYHLRKKLVDSTDKADLRLIYLALAHMIKFRGHFLIEGDL |
| | Nickase | NPDNSDVDKLFIQLVQTYNQLFEENPINASGVDAKAILSARLS |
| | | KSRRLENLIAQLPGEKKNGLFGNLIALSLGLTPNFKSNFDLAED |
| | | AKLQLSKDTYDDDLDNLLAQIGDQYADLFLAAKNLSDAILLS |
| | | DILRVNTEITKAPLSASMIKRYDEHHQDLTLLKALVRQQLPEK |
| | | YKEIFFDQSKNGYAGYIDGGASQEEFYKFIKPILEKMDGTEELL |
| | | VKLNREDLLRKQRTFDNGSIPHQIHLGELHAILRRQEDFYPFLK |
| | | DNREKIEKILTFRIPYYVGPLARGNSRFAWMTRKSEETITPWNF |
| | | EEVVDKGASAQSFIERMTNFDKNLPNEKVLPKHSLLYEYFTVY |
| | | NELTKVKYVTEGMRKPAFLSGEQKKAIVDLLFKTNRKVTVKQ |
| | | LKEDYFKKIECFDSVEISGVEDRFNASLGTYHDLLKIIKDKDFL |
| | | DNEENEDILEDIVLTLTLFEDREMIEERLKTY AHLFDDKVMKQ |
| | | LKRRRYTGWGRLSRKLINGIRDKQSGKTILDFLKSDGFANRNF |
| | | MQLIHDDSLTFKEDIQKAQVSGQGDSLHEHIANLAGSPAIKKGI |
| | | LQTVKVVDELVKVMGRHKPENIVIEMARENQTTQKGQKNSRE |
| | | RMKRIEEGIKELGSQILKEHPVENTQLQNEKLYLYYLQNGRDM |
| | | YVDQELDINRLSDYDVDAIVPQSFLKDDSIDNKVLTRSDKNRG |
| | | KSDNVPSEEVVKKMKNYWRQLLNAKLITQRKFDNLTKAERG |
| | | GLSELDKAGFIKRQLVETRQITKHVAQILDSRMNTKYDENDKL |
| | | IREVKVITLKSKLVSDFRKDFQFYKVREINNYHHAHDAYLNAV |
| | | VGTALIKKYPKLESEFVYGDYKVYDVRKMIAKSEQEIGKATA |
| | | KYFFYSNIMNFFKTEITLANGEIRKRPLIETNGETGEIVWDKGR |
| | | DFATVRKVLSMPQVNIVKKTEVQTGGFSKESIRPKRNSDKLIA |
| | | RKKDWDPKKYGGFLWPTVAYSVLVVAKVEKGKSKKLKSVK |
| | | ELLGITIMERSSFEKNPIDFLEAKGYKEVKKDLIIKLPKYSLFEL |
| | | ENGRKRMLASAKQLQKGNELALPSKYVNFLYLASHYEKLKGS |
| | | PEDNEQKQLFVEQHKHYLDEIIEQISEFSKRVILADANLDKVLS |
| | | AYNKHRDKPIREQAENIIHLFTLTRLGAPRAFKYFDTTIDPKQY |
| | | RSTKEVLDATLIHQSITGLYETRIDLSQLGGD |
| 2301 | SRGN3.1 | MNQKFILGLDIGITSVGYGLIDYETKNIIDAGVRLFPEANVENN |
| | Cas9 | EGRRSKRGSRRLKRRRIHRLERVKLLLTEYDLINKEQIPTSNNP |
| | | YQIRVKGLSEILSKDELAIALLHLAKRRGIHNVDVAADKEETA |
| | | SDSLSTKDQINKNAKFLESRYVCELQKERLENEGHVRGVENRF |
| | | LTKDIVREAKKIIDTQMQYYPEIDETFKEKYISLVETRREYFEGP |
| | | GQGSPFGWNGDLKKWYEMLMGHCTYFPQELRSVKYAYSAD |
| | | LFNALNDLNNLIIQRDNSEKLEYHEKYHIIENVFKQKKKPTLKQ |
| | | IAKEIGVNPEDIKGYRITKSGTPEFTSFKLFHDLKKVVKDHAIL |
| | | DDIDLLNQIAEILTIYQDKDSIVAELGQLEYLMSEADKQSISELT |
| | | GYTGTHSLSLKCMNMIIDELWHSSMNQMEVFTYLNMRPKKY |
| | | ELKGYQRIPTDMIDDAILSPVVKRTFIQSINVINKVIEKYGIPEDI |
| | | IIELARENNSDDRKKFINNLQKKNEATRKRINEIIGQTGNQNAK |
| | | RIVEKIRLHDQQEGKCLYSLESIPLEDLLNNPNHYEVDHIIPRSV |
| | | SFDNSYHNKVLVKQSENSKKSNLTPYQYFNSGKSKLSYNQFK |
| | | QHILNLSKSQDRISKKKKEYLLEERDINKFEVQKEFINRNLVDT |
| | | RYATRELTNYLKAYFSANNMNVKVKTINGSFTDYLRKVWKF |
| | | KKERNHGYKHHAEDALIIANADFLFKENKKLKAVNSVLEKPEI |
| | | ETKQLDIQVDSEDNYSEMFIIPKQVQDIKDFRNFKYSHRVDKK |
| | | PNRQLINDTLYSTRKKDNSTYIVQTIKDIYAKDNTTLKKQFDKS |
| | | PEKFLMYQHDPRTFEKLEVIMKQYANEKNPLAKYHEETGEYL |
| | | TKYSKKNNGPIVKSLKYIGNKLGSHLDVTHQFKSSTKKLVKLS |
| | | IKNYRFDVYLTEKGYKFVTIAYLNVFKKDNYYYIPKDKYQEL |
| | | KEKKKIKDTDQFIASFYKNDLIKLNGDLYKIIGVNSDDRNIIELD |
| | | YYDIKYKDYCEINNIKGEPRIKKTIGKKTESIEKFTTDVLGNLY |
| | | LHSTEKAPQLIFKRGL |
| 2302 | sRGN3.1 | MNQKFILGLDIGITSVGYGLIDYETKNIIDAGVRLFPEANVENN |
| | (N585A) | EGRRSKRGSRRLKRRRIHRLERVKLLLTEYDLINKEQIPTSNNP |
| | Cas9 | YQIRVKGLSEILSKDELAIALLHLAKRRGIHNVDVAADKEETA |
| | Nickase | SDSLSTKDQINKNAKFLESRYVCELQKERLENEGHVRGVENRF |
| | | LTKDIVREAKKIIDTQMQYYPEIDETFKEKYISLVETRREYFEGP |
| | | GQGSPFGWNGDLKKWYEMLMGHCTYFPQELRSVKYAYSAD |
| | | LFNALNDLNNLIIQRDNSEKLEYHEKYHIIENVFKQKKKPTLKQ |
| | | IAKEIGVNPEDIKGYRITKSGTPEFTSFKLFHDLKKVVKDHAIL |
| | | DDIDLLNQIAEILTIYQDKDSIVAELGQLEYLMSEADKQSISELT |
| | | GYTGTHSLSLKCMNMIIDELWHSSMNQMEVFTYLNMRPKKY |
| | | ELKGYQRIPTDMIDDAILSPVVKRTFIQSINVINKVIEKYGIPEDI |
| | | IIELARENNSDDRKKFINNLQKKNEATRKRINEIIGQTGNQNAK |
| | | RIVEKIRLHDQQEGKCLYSLESIPLEDLLNNPNHYEVDHIIPRSV |
| | | SFDNSYHNKVLVKQSEASKKSNLTPYQYFNSGKSKLSYNQFK |
| | | QHILNLSKSQDRISKKKKEYLLEERDINKFEVQKEFINRNLVDT |
| | | RYATRELTNYLKAYFSANNMNVKVKTINGSFTDYLRKVWKF |
| | | KKERNHGYKHHAEDALIIANADFLFKENKKLKAVNSVLEKPEI |
| | | ETKQLDIQVDSEDNYSEMFIIPKQVQDIKDFRNFKYSHRVDKK |
| | | PNRQLINDTLYSTRKKDNSTYIVQTIKDIYAKDNTTLKKQFDKS |
| | | PEKFLMYQHDPRTFEKLEVIMKQYANEKNPLAKYHEETGEYL |
| | | TKYSKKNNGPIVKSLKYIGNKLGSHLDVTHQFKSSTKKLVKLS |
| | | IKNYRFDVYLTEKGYKFVTIAYLNVFKKDNYYYIPKDKYQEL |
| | | KEKKKIKDTDQFIASFYKNDLIKLNGDLYKIIGVNSDDRNIIELD |
| | | YYDIKYKDYCEINNIKGEPRIKKTIGKKTESIEKFTTDVLGNLY |
| | | LHSTEKAPQLIFKRGL |
| 2303 | Met(-) | NQKFILGLDIGITSVGYGLIDYETKNIIDAGVRLFPEANVENNE |
| | SRGN3.1 | GRRSKRGSRRLKRRRIHRLERVKLLLTEYDLINKEQIPTSNNPY |
| | (N584A) | QIRVKGLSEILSKDELAIALLHLAKRRGIHNVDVAADKEETAS |
| | Nickase | DSLSTKDQINKNAKFLESRYVCELQKERLENEGHVRGVENRFL |
| | | TKDIVREAKKIIDTQMQYYPEIDETFKEKYISLVETRREYFEGP |
| | | GQGSPFGWNGDLKKWYEMLMGHCTYFPQELRSVKYAYSAD |
| | | LFNALNDLNNLIIQRDNSEKLEYHEKYHIIENVFKQKKKPTLKQ |
| | | IAKEIGVNPEDIKGYRITKSGTPEFTSFKLFHDLKKVVKDHAIL |
| | | DDIDLLNQIAEILTIYQDKDSIVAELGQLEYLMSEADKQSISELT |
| | | GYTGTHSLSLKCMNMIIDELWHSSMNQMEVFTYLNMRPKKY |
| | | ELKGYQRIPTDMIDDAILSPVVKRTFIQSINVINKVIEKYGIPEDI |
| | | IIELARENNSDDRKKFINNLQKKNEATRKRINEIIGQTGNQNAK |
| | | RIVEKIRLHDQQEGKCLYSLESIPLEDLLNNPNHYEVDHIIPRSV |
| | | SFDNSYHNKVLVKQSEASKKSNLTPYQYFNSGKSKLSYNQFK |
| | | QHILNLSKSQDRISKKKKEYLLEERDINKFEVQKEFINRNLVDT |
| | | RYATRELTNYLKAYFSANNMNVKVKTINGSFTDYLRKVWKF |
| | | KKERNHGYKHHAEDALIIANADFLFKENKKLKAVNSVLEKPEI |
| | | ETKQLDIQVDSEDNYSEMFIIPKQVQDIKDFRNFKYSHRVDKK |
| | | PNRQLINDTLYSTRKKDNSTYIVQTIKDIYAKDNTTLKKQFDKS |
| | | PEKFLMYQHDPRTFEKLEVIMKQYANEKNPLAKYHEETGEYL |
| | | TKYSKKNNGPIVKSLKYIGNKLGSHLDVTHQFKSSTKKLVKLS |
| | | IKNYRFDVYLTEKGYKFVTIAYLNVFKKDNYYYIPKDKYQEL |
| | | KEKKKIKDTDQFIASFYKNDLIKLNGDLYKIIGVNSDDRNIIELD |
| | | YYDIKYKDYCEINNIKGEPRIKKTIGKKTESIEKFTTDVLGNLY |
| | | LHSTEKAPQLIFKRGL |
| 2304 | SRGN3.3 | MNQKFILGLDIGITSVGYGLIDYETKNIIDAGVRLFPEANVENN |
| | Cas9 | EGRRSKRGSRRLKRRRIHRLERVKLLLTEYDLINKEQIPTSNNP |
| | | YQIRVKGLSEILSKDELAIALLHLAKRRGIHNVDVAADKEETA |
| | | SDSLSTKDQINKNAKFLESRYVCELQKERLENEGHVRGVENRF |
| | | LTKDIVREAKKIIDTQMQYYPEIDETFKEKYISLVETRREYFEGP |
| | | GQGSPFGWNGDLKKWYEMLMGHCTYFPQELRSVKYAYSAD |
| | | LFNALNDLNNLIIQRDNSEKLEYHEKYHIIENVFKQKKKPTLKQ |
| | | IAKEIGVNPEDIKGYRITKSGTPEFTSFKLFHDLKKVVKDHAIL |
| | | DDIDLLNQIAEILTIYQDKDSIVAELGQLEYLMSEADKQSISELT |
| | | GYTGTHSLSLKCMNMIIDELWHSSMNQMEVFTYLNMRPKKY |
| | | ELKGYQRIPTDMIDDAILSPVVKRTFIQSINVINKVIEKYGIPEDI |
| | | IIELARENNSDDRKKFINNLQKKNEATRKRINEIIGQTGNQNAK |
| | | RIVEKIRLHDQQEGKCLYSLESIPLEDLLNNPNHYEVDHIIPRSV |
| | | SFDNSYHNKVLVKQSENSKKSNLTPYQYFNSGKSKLSYNQFK |
| | | QHILNLSKSQDRISKKKKEYLLEERDINKFEVQKEFINRNLVDT |
| | | RYATRELTSYLKAYFSANNMDVKVKTINGSFTNHLRKVWRFD |
| | | KYRNHGYKHHAEDALIIANADFLFKENKKLQNTNKILEKPTIE |
| | | NNTKKVTVEKEEDYNNVFETPKLVEDIKQYRDYKFSHRVDKK |
| | | PNRQLINDTLYSTRMKDEHDYIVQTITDIYGKDNTNLKKQFNK |
| | | NPEKFLMYQNDPKTFEKLSIIMKQYSDEKNPLAKYYEETGEYL |
| | | TKYSKKNNGPIVKKIKLLGNKVGNHLDVTNKYENSTKKLVKL |
| | | SIKNYRFDVYLTEKGYKFVTIAYLNVFKKDNYYYIPKDKYQEL |
| | | KEKKKIKDTDQFIASFYKNDLIKLNGDLYKIIGVNSDDRNIIELD |
| | | YYDIKYKDYCEINNIKGEPRIKKTIGKKTESIEKFTTDVLGNLY |
| | | LHSTEKAPQLIFKRGL |
| 2305 | SRGN3.3 | MNQKFILGLDIGITSVGYGLIDYETKNIIDAGVRLFPEANVENN |
| | (N585A) | EGRRSKRGSRRLKRRRIHRLERVKLLLTEYDLINKEQIPTSNNP |
| | Cas9 | YQIRVKGLSEILSKDELAIALLHLAKRRGIHNVDVAADKEETA |
| | Nickase | SDSLSTKDQINKNAKFLESRYVCELQKERLENEGHVRGVENRF |
| | | LTKDIVREAKKIIDTQMQYYPEIDETFKEKYISLVETRREYFEGP |
| | | GQGSPFGWNGDLKKWYEMLMGHCTYFPQELRSVKYAYSAD |
| | | LFNALNDLNNLIIQRDNSEKLEYHEKYHIIENVFKQKKKPTLKQ |
| | | IAKEIGVNPEDIKGYRITKSGTPEFTSFKLFHDLKKVVKDHAIL |
| | | DDIDLLNQIAEILTIYQDKDSIVAELGQLEYLMSEADKQSISELT |
| | | GYTGTHSLSLKCMNMIIDELWHSSMNQMEVFTYLNMRPKKY |
| | | ELKGYQRIPTDMIDDAILSPVVKRTFIQSINVINKVIEKYGIPEDI |
| | | IIELARENNSDDRKKFINNLQKKNEATRKRINEIIGQTGNQNAK |
| | | RIVEKIRLHDQQEGKCLYSLESIPLEDLLNNPNHYEVDHIIPRSV |
| | | SFDNSYHNKVLVKQSEASKKSNLTPYQYFNSGKSKLSYNQFK |
| | | QHILNLSKSQDRISKKKKEYLLEERDINKFEVQKEFINRNLVDT |
| | | RYATRELTSYLKAYFSANNMDVKVKTINGSFTNHLRKVWRFD |
| | | KYRNHGYKHHAEDALIIANADFLFKENKKLQNTNKILEKPTIE |
| | | NNTKKVTVEKEEDYNNVFETPKLVEDIKQYRDYKFSHRVDKK |
| | | PNRQLINDTLYSTRMKDEHDYIVQTITDIYGKDNTNLKKQFNK |
| | | NPEKFLMYQNDPKTFEKLSIIMKQYSDEKNPLAKYYEETGEYL |
| | | TKYSKKNNGPIVKKIKLLGNKVGNHLDVTNKYENSTKKLVKL |
| | | SIKNYRFDVYLTEKGYKFVTIAYLNVFKKDNYYYIPKDKYQEL |
| | | KEKKKIKDTDQFIASFYKNDLIKLNGDLYKIIGVNSDDRNIIELD |
| | | YYDIKYKDYCEINNIKGEPRIKKTIGKKTESIEKFTTDVLGNLY |
| | | LHSTEKAPQLIFKRGL |
| 2306 | Met(-) | NQKFILGLDIGITSVGYGLIDYETKNIIDAGVRLFPEANVENNE |
| | SRGN3.3 | GRRSKRGSRRLKRRRIHRLERVKLLLTEYDLINKEQIPTSNNPY |
| | (N584A) | QIRVKGLSEILSKDELAIALLHLAKRRGIHNVDVAADKEETAS |
| | Cas9 | DSLSTKDQINKNAKFLESRYVCELQKERLENEGHVRGVENRFL |
| | Nickase | TKDIVREAKKIIDTQMQYYPEIDETFKEKYISLVETRREYFEGP |
| | | GQGSPFGWNGDLKKWYEMLMGHCTYFPQELRSVKYAYSAD |
| | | LFNALNDLNNLIIQRDNSEKLEYHEKYHIIENVFKQKKKPTLKQ |
| | | IAKEIGVNPEDIKGYRITKSGTPEFTSFKLFHDLKKVVKDHAIL |
| | | DDIDLLNQIAEILTIYQDKDSIVAELGQLEYLMSEADKQSISELT |
| | | GYTGTHSLSLKCMNMIIDELWHSSMNQMEVFTYLNMRPKKY |
| | | ELKGYQRIPTDMIDDAILSPVVKRTFIQSINVINKVIEKYGIPEDI |
| | | IIELARENNSDDRKKFINNLQKKNEATRKRINEIIGQTGNQNAK |
| | | RIVEKIRLHDQQEGKCLYSLESIPLEDLLNNPNHYEVDHIIPRSV |
| | | SFDNSYHNKVLVKQSEASKKSNLTPYQYFNSGKSKLSYNQFK |
| | | QHILNLSKSQDRISKKKKEYLLEERDINKFEVQKEFINRNLVDT |
| | | RYATRELTSYLKAYFSANNMDVKVKTINGSFTNHLRKVWRFD |
| | | KYRNHGYKHHAEDALIIANADFLFKENKKLQNTNKILEKPTIE |
| | | NNTKKVTVEKEEDYNNVFETPKLVEDIKQYRDYKFSHRVDKK |
| | | PNRQLINDTLYSTRMKDEHDYIVQTITDIYGKDNTNLKKQFNK |
| | | NPEKFLMYQNDPKTFEKLSIIMKQYSDEKNPLAKYYEETGEYL |
| | | TKYSKKNNGPIVKKIKLLGNKVGNHLDVTNKYENSTKKLVKL |
| | | SIKNYRFDVYLTEKGYKFVTIAYLNVFKKDNYYYIPKDKYQEL |
| | | KEKKKIKDTDQFIASFYKNDLIKLNGDLYKIIGVNSDDRNIIELD |
| | | YYDIKYKDYCEINNIKGEPRIKKTIGKKTESIEKFTTDVLGNLY |
| | | LHSTEKAPQLIFKRGL |
| 2307 | SpG Cas9 | MDKKYSIGLDIGTNSVGWAVITDEYKVPSKKFKVLGNTDRHSI |
| | | KKNLIGALLFDSGETAEATRLKRTARRRYTRRKNRICYLQEIFS |
| | | NEMAKVDDSFFHRLEESFLVEEDKKHERHPIFGNIVDEVAYHE |
| | | KYPTIYHLRKKLVDSTDKADLRLIYLALAHMIKFRGHFLIEGD |
| | | LNPDNSDVDKLFIQLVQTYNQLFEENPINASGVDAKAILSARLS |
| | | KSRRLENLIAQLPGEKKNGLFGNLIALSLGLTPNFKSNFDLAED |
| | | AKLQLSKDTYDDDLDNLLAQIGDQYADLFLAAKNLSDAILLS |
| | | DILRVNTEITKAPLSASMIKRYDEHHQDLTLLKALVRQQLPEK |
| | | YKEIFFDQSKNGYAGYIDGGASQEEFYKFIKPILEKMDGTEELL |
| | | VKLNREDLLRKQRTFDNGSIPHQIHLGELHAILRRQEDFYPFLK |
| | | DNREKIEKILTFRIPYYVGPLARGNSRFAWMTRKSEETITPWNF |
| | | EEVVDKGASAQSFIERMTNFDKNLPNEKVLPKHSLLYEYFTVY |
| | | NELTKVKYVTEGMRKPAFLSGEQKKAIVDLLFKTNRKVTVKQ |
| | | LKEDYFKKIECFDSVEISGVEDRFNASLGTYHDLLKIIKDKDFL |
| | | DNEENEDILEDIVLTLTLFEDREMIEERLKTYAHLFDDKVMKQ |
| | | LKRRRYTGWGRLSRKLINGIRDKQSGKTILDFLKSDGFANRNF |
| | | MQLIHDDSLTFKEDIQKAQVSGQGDSLHEHIANLAGSPAIKKGI |
| | | LQTVKVVDELVKVMGRHKPENIVIEMARENQTTQKGQKNSRE |
| | | RMKRIEEGIKELGSQILKEHPVENTQLQNEKLYLYYLQNGRDM |
| | | YVDQELDINRLSDYDVDHIVPQSFLKDDSIDNKVLTRSDKNRG |
| | | KSDNVPSEEVVKKMKNYWRQLLNAKLITQRKFDNLTKAERG |
| | | GLSELDKAGFIKRQLVETRQITKHVAQILDSRMNTKYDENDKL |
| | | IREVKVITLKSKLVSDFRKDFQFYKVREINNYHHAHDAYLNAV |
| | | VGTALIKKYPKLESEFVYGDYKVYDVRKMIAKSEQEIGKATA |
| | | KYFFYSNIMNFFKTEITLANGEIRKRPLIETNGETGEIVWDKGR |
| | | DFATVRKVLSMPQVNIVKKTEVQTGGFSKESILPKRNSDKLIA |
| | | RKKDWDPKKYGGFLWPTVAYSVLVVAKVEKGKSKKLKSVK |
| | | ELLGITIMERSSFEKNPIDFLEAKGYKEVKKDLIIKLPKYSLFEL |
| | | ENGRKRMLASAKQLQKGNELALPSKYVNFLYLASHYEKLKGS |
| | | PEDNEQKQLFVEQHKHYLDEIIEQISEFSKRVILADANLDKVLS |
| | | AYNKHRDKPIREQAENIIHLFTLTNLGAPAAFKYFDTTIDRKQY |
| | | RSTKEVLDATLIHQSITGLYETRIDLSQLGGD |
| 2308 | SpG | MDKKYSIGLDIGTNSVGWAVITDEYKVPSKKFKVLGNTDRHSI |
| | (H840A) | KKNLIGALLFDSGETAEATRLKRTARRRYTRRKNRICYLQEIFS |
| | Cas9 | NEMAKVDDSFFHRLEESFLVEEDKKHERHPIFGNIVDEVAYHE |
| | Nickase | KYPTIYHLRKKLVDSTDKADLRLIYLALAHMIKFRGHFLIEGD |
| | | LNPDNSDVDKLFIQLVQTYNQLFEENPINASGVDAKAILSARLS |
| | | KSRRLENLIAQLPGEKKNGLFGNLIALSLGLTPNFKSNFDLAED |
| | | AKLQLSKDTYDDDLDNLLAQIGDQYADLFLAAKNLSDAILLS |
| | | DILRVNTEITKAPLSASMIKRYDEHHQDLTLLKALVRQQLPEK |
| | | YKEIFFDQSKNGYAGYIDGGASQEEFYKFIKPILEKMDGTEELL |
| | | VKLNREDLLRKQRTFDNGSIPHQIHLGELHAILRRQEDFYPFLK |
| | | DNREKIEKILTFRIPYYVGPLARGNSRFAWMTRKSEETITPWNF |
| | | EEVVDKGASAQSFIERMTNFDKNLPNEKVLPKHSLLYEYFTVY |
| | | NELTKVKYVTEGMRKPAFLSGEQKKAIVDLLFKTNRKVTVKQ |
| | | LKEDYFKKIECFDSVEISGVEDRFNASLGTYHDLLKIIKDKDFL |
| | | DNEENEDILEDIVLTLTLFEDREMIEERLKTYAHLFDDKVMKQ |
| | | LKRRRYTGWGRLSRKLINGIRDKQSGKTILDFLKSDGFANRNF |
| | | MQLIHDDSLTFKEDIQKAQVSGQGDSLHEHIANLAGSPAIKKGI |
| | | LQTVKVVDELVKVMGRHKPENIVIEMARENQTTQKGQKNSRE |
| | | RMKRIEEGIKELGSQILKEHPVENTQLQNEKLYLYYLQNGRDM |
| | | YVDQELDINRLSDYDVDAIVPQSFLKDDSIDNKVLTRSDKNRG |
| | | KSDNVPSEEVVKKMKNYWRQLLNAKLITQRKFDNLTKAERG |
| | | GLSELDKAGFIKRQLVETRQITKHVAQILDSRMNTKYDENDKL |
| | | IREVKVITLKSKLVSDFRKDFQFYKVREINNYHHAHDAYLNAV |
| | | VGTALIKKYPKLESEFVYGDYKVYDVRKMIAKSEQEIGKATA |
| | | KYFFYSNIMNFFKTEITLANGEIRKRPLIETNGETGEIVWDKGR |
| | | DFATVRKVLSMPQVNIVKKTEVQTGGFSKESILPKRNSDKLIA |
| | | RKKDWDPKKYGGFLWPTVAYSVLVVAKVEKGKSKKLKSVK |
| | | ELLGITIMERSSFEKNPIDFLEAKGYKEVKKDLIIKLPKYSLFEL |
| | | ENGRKRMLASAKQLQKGNELALPSKYVNFLYLASHYEKLKGS |
| | | PEDNEQKQLFVEQHKHYLDEIIEQISEFSKRVILADANLDKVLS |
| | | AYNKHRDKPIREQAENIIHLFTLTNLGAPAAFKYFDTTIDRKQY |
| | | RSTKEVLDATLIHQSITGLYETRIDLSQLGGD |
| 2309 | Met(-) SpG | DKKYSIGLDIGTNSVGWAVITDEYKVPSKKFKVLGNTDRHSIK |
| | (H839A) | KNLIGALLFDSGETAEATRLKRTARRRYTRRKNRICYLQEIFSN |
| | Cas9 | EMAKVDDSFFHRLEESFLVEEDKKHERHPIFGNIVDEVAYHEK |
| | Nickase | YPTIYHLRKKLVDSTDKADLRLIYLALAHMIKFRGHFLIEGDL |
| | | NPDNSDVDKLFIQLVQTYNQLFEENPINASGVDAKAILSARLS |
| | | KSRRLENLIAQLPGEKKNGLFGNLIALSLGLTPNFKSNFDLAED |
| | | AKLQLSKDTYDDDLDNLLAQIGDQYADLFLAAKNLSDAILLS |
| | | DILRVNTEITKAPLSASMIKRYDEHHQDLTLLKALVRQQLPEK |
| | | YKEIFFDQSKNGYAGYIDGGASQEEFYKFIKPILEKMDGTEELL |
| | | VKLNREDLLRKQRTFDNGSIPHQIHLGELHAILRRQEDFYPFLK |
| | | DNREKIEKILTFRIPYYVGPLARGNSRFAWMTRKSEETITPWNF |
| | | EEVVDKGASAQSFIERMTNFDKNLPNEKVLPKHSLLYEYFTVY |
| | | NELTKVKYVTEGMRKPAFLSGEQKKAIVDLLFKTNRKVTVKQ |
| | | LKEDYFKKIECFDSVEISGVEDRFNASLGTYHDLLKIIKDKDFL |
| | | DNEENEDILEDIVLTLTLFEDREMIEERLKTYAHLFDDKVMKQ |
| | | LKRRRYTGWGRLSRKLINGIRDKQSGKTILDFLKSDGFANRNF |
| | | MQLIHDDSLTFKEDIQKAQVSGQGDSLHEHIANLAGSPAIKKGI |
| | | LQTVKVVDELVKVMGRHKPENIVIEMARENQTTQKGQKNSRE |
| | | RMKRIEEGIKELGSQILKEHPVENTQLQNEKLYLYYLQNGRDM |
| | | YVDQELDINRLSDYDVDAIVPQSFLKDDSIDNKVLTRSDKNRG |
| | | KSDNVPSEEVVKKMKNYWRQLLNAKLITQRKFDNLTKAERG |
| | | GLSELDKAGFIKRQLVETRQITKHVAQILDSRMNTKYDENDKL |
| | | IREVKVITLKSKLVSDFRKDFQFYKVREINNYHHAHDAYLNAV |
| | | VGTALIKKYPKLESEFVYGDYKVYDVRKMIAKSEQEIGKATA |
| | | KYFFYSNIMNFFKTEITLANGEIRKRPLIETNGETGEIVWDKGR |
| | | DFATVRKVLSMPQVNIVKKTEVQTGGFSKESILPKRNSDKLIA |
| | | RKKDWDPKKYGGFLWPTVAYSVLVVAKVEKGKSKKLKSVK |
| | | ELLGITIMERSSFEKNPIDFLEAKGYKEVKKDLIIKLPKYSLFEL |
| | | ENGRKRMLASAKQLQKGNELALPSKYVNFLYLASHYEKLKGS |
| | | PEDNEQKQLFVEQHKHYLDEIIEQISEFSKRVILADANLDKVLS |
| | | AYNKHRDKPIREQAENIIHLFTLTNLGAPAAFKYFDTTIDRKQY |
| | | RSTKEVLDATLIHQSITGLYETRIDLSQLGGD |
| | saCas9 PAM | NNGRRT |
| | saCas9 PAM | NNGRRN |
| | saCas9-KKH | NNNRRT |
| | (E782K, | |
| | N968K, | |
| | R1015H) | |
| | PAM | |
| | NmCas9 | NNNNGATT |
| | PAM | |
| | StCas9 PAM | NNAGAAW |
| | TdCas9 | NAAAAC |
| | PAM | |
| 2316 | NLS of | PKKKRKV |
| | SV40 Large | |
| | T-AG | |
| 2311 | N-terminal | MKRTADGSEFESPKKKRKV |
| | NLS and | |
| | Linker for | |
| | Exemplary | |
| | Prime Editor | |
| | Or | |
| | PEmax-N- | |
| | terminal | |
| | bpSV40NLS | |
| 2310 | NLS | MDSLLMNRRKFLYQFKNVRWAKGRRETYLC |
| 2319 | NLS of | AVKRPAATKKAGQAKKKKLD |
| | Nucleoplasmin | |
| 2320 | NLS of | MSRRRKANPTKLSENAKKLAKEVEN |
| | EGL-13 | |
| 2321 | NLS of C- | PAAKRVKLD |
| | Myc | |
| 2322 | NLS of Tus- | KLKIKRPVK |
| | protein | |
| 2323 | NLS of | VSRKRPRP |
| | polyoma | |
| | large T-AG | |
| 2324 | NLS of | EGAPPAKRAR |
| | Hepatitis D | |
| | virus antigen | |
| 2325 | NLS of | PPQPKKKPLDGE |
| | murine p53 | |
| 2326 | C-Terminal | SGGSKRTADGSEFEPKKKRKV |
| | linker and | |
| | NLS for | |
| | Exemplary | |
| | Prime Editor | |
| 2327 | MS2 aptamer | GCCAACATGAGGATCACCCATGTCTGCAGGGCC |
| 2328 | MS2cp | GSASNFTQFVLVDNGGTGDVTVAPSNFANGVAEWISSNSRSQ |
| | | AYKVTCSVRQSSAQNRKYTIKVEVPKVATQTVGGEELPVAGW |
| | | RSYLNMELTIPIFATNSDCELIVKAMQGLLKDGNPIPSAIAANS |
| | | GIY |
| 2343 | Exemplary | MKRTADGSEFESPKKKRKVDKKYSIGLDIGTNSVGWAVITDE |
| | Prime Editor | YKVPSKKFKVLGNTDRHSIKKNLIGALLFDSGETAEATRLKRT |
| | fusion | ARRRYTRRKNRICYLQEIFSNEMAKVDDSFFHRLEESFLVEED |
| | protein | KKHERHPIFGNIVDEVAYHEKYPTIYHLRKKLVDSTDKADLRL |
| | [NLS]- | IYLALAHMIKFRGHFLIEGDLNPDNSDVDKLFIQLVQTYNQLFE |
| | [Cas9(H840A)]- | ENPINASGVDAKAILSARLSKSRRLENLIAQLPGEKKNGLFGNL |
| | [linker]- | IALSLGLTPNFKSNFDLAEDAKLQLSKDTYDDDLDNLLAQIGD |
| | [MMLV_RT | QYADLFLAAKNLSDAILLSDILRVNTEITKAPLSASMIKRYDEH |
| | (D200N)(T330P) | HQDLTLLKALVRQQLPEKYKEIFFDQSKNGYAGYIDGGASQEE |
| | (L603W) | FYKFIKPILEKMDGTEELLVKLNREDLLRKQRTFDNGSIPHQIH |
| | (T306K) | LGELHAILRRQEDFYPFLKDNREKIEKILTFRIPYYVGPLARGNS |
| | (W313F)]- | RFAWMTRKSEETITPWNFEEVVDKGASAQSFIERMTNFDKNLP |
| | [NLS] | NEKVLPKHSLLYEYFTVYNELTKVKYVTEGMRKPAFLSGEQK |
| | | KAIVDLLFKTNRKVTVKQLKEDYFKKIECFDSVEISGVEDRFN |
| | | ASLGTYHDLLKIIKDKDFLDNEENEDILEDIVLTLTLFEDREMIE |
| | | ERLKTYAHLFDDKVMKQLKRRRYTGWGRLSRKLINGIRDKQS |
| | | GKTILDFLKSDGFANRNFMQLIHDDSLTFKEDIQKAQVSGQGD |
| | | SLHEHIANLAGSPAIKKGILQTVKVVDELVKVMGRHKPENIVIE |
| | | MARENQTTQKGQKNSRERMKRIEEGIKELGSQILKEHPVENTQ |
| | | LQNEKLYLYYLQNGRDMYVDQELDINRLSDYDVDAIVPQSFL |
| | | KDDSIDNKVLTRSDKNRGKSDNVPSEEVVKKMKNYWRQLLN |
| | | AKLITQRKFDNLTKAERGGLSELDKAGFIKRQLVETRQITKHV |
| | | AQILDSRMNTKYDENDKLIREVKVITLKSKLVSDFRKDFQFYK |
| | | VREINNYHHAHDAYLNAVVGTALIKKYPKLESEFVYGDYKVY |
| | | DVRKMIAKSEQEIGKATAKYFFYSNIMNFFKTEITLANGEIRKR |
| | | PLIETNGETGEIVWDKGRDFATVRKVLSMPQVNIVKKTEVQTG |
| | | GFSKESILPKRNSDKLIARKKDWDPKKYGGFDSPTVAYSVLVV |
| | | AKVEKGKSKKLKSVKELLGITIMERSSFEKNPIDFLEAKGYKE |
| | | VKKDLIIKLPKYSLFELENGRKRMLASAGELQKGNELALPSKY |
| | | VNFLYLASHYEKLKGSPEDNEQKQLFVEQHKHYLDEIIEQISEF |
| | | SKRVILADANLDKVLSAYNKHRDKPIREQAENIIHLFTLTNLGA |
| | | PAAFKYFDTTIDRKRYTSTKEVLDATLIHQSITGLYETRIDLSQL |
| | | GGDSGGSSGGSSGSETPGTSESATPESSGGSSGGSSTLNIEDEYR |
| | | LHETSKEPDVSLGSTWLSDFPQAWAETGGMGLAVRQAPLIIPL |
| | | KATSTPVSIKQYPMSQEARLGIKPHIQRLLDQGILVPCQSPWNT |
| | | PLLPVKKPGTNDYRPVQDLREVNKRVEDIHPTVPNPYNLLSGL |
| | | PPSHQWYTVLDLKDAFFCLRLHPTSQPLFAFEWRDPEMGISGQ |
| | | LTWTRLPQGFKNSPTLFNEALHRDLADFRIQHPDLILLQYVDD |
| | | LLLAATSELDCQQGTRALLQTLGNLGYRASAKKAQICQKQVK |
| | | YLGYLLKEGQRWLTEARKETVMGQPTPKTPRQLREFLGKAGF |
| | | CRLFIPGFAEMAAPLYPLTKPGTLFNWGPDQQKAYQEIKQALL |
| | | TAPALGLPDLTKPFELFVDEKQGYAKGVLTQKLGPWRRPVAY |
| | | LSKKLDPVAAGWPPCLRMVAAIAVLTKDAGKLTMGQPLVILA |
| | | PHAVEALVKQPPDRWLSNARMTHYQALLLDTDRVQFGPVVA |
| | | LNPATLLPLPEEGLQHNCLDILAEAHGTRPDLTDQPLPDADHT |
| | | WYTDGSSLLQEGQRKAGAAVTTETEVIWAKALPAGTSAQRAE |
| | | LIALTQALKMAEGKKLNVYTDSRYAFATAHIHGEIYRRRGWL |
| | | TSEGKEIKNKDEILALLKALFLPKRLSIIHCPGHQKGHSAEARG |
| | | NRMADQAARKAAITETPDTSTLLIENSSPSGGSKRTADGSEFEP |
| | | KKKRKV |
| 2344 | Pemax Prime | MKRTADGSEFESPKKKRKVDKKYSIGLDIGTNSVGWAVITDE |
| | Editor | YKVPSKKFKVLGNTDRHSIKKNLIGALLFDSGETAEATRLKRT |
| | | ARRRYTRRKNRICYLQEIFSNEMAKVDDSFFHRLEESFLVEED |
| | | KKHERHPIFGNIVDEVAYHEKYPTIYHLRKKLVDSTDKADLRL |
| | | IYLALAHMIKFRGHFLIEGDLNPDNSDVDKLFIQLVQTYNQLFE |
| | | ENPINASGVDAKAILSARLSKSRKLENLIAQLPGEKKNGLFGNL |
| | | IALSLGLTPNFKSNFDLAEDAKLQLSKDTYDDDLDNLLAQIGD |
| | | QYADLFLAAKNLSDAILLSDILRVNTEITKAPLSASMIKRYDEH |
| | | HQDLTLLKALVRQQLPEKYKEIFFDQSKNGYAGYIDGGASQEE |
| | | FYKFIKPILEKMDGTEELLVKLKREDLLRKQRTFDNGSIPHQIH |
| | | LGELHAILRRQEDFYPFLKDNREKIEKILTFRIPYYVGPLARGNS |
| | | RFAWMTRKSEETITPWNFEEVVDKGASAQSFIERMTNFDKNLP |
| | | NEKVLPKHSLLYEYFTVYNELTKVKYVTEGMRKPAFLSGEQK |
| | | KAIVDLLFKTNRKVTVKQLKEDYFKKIECFDSVEISGVEDRFN |
| | | ASLGTYHDLLKIIKDKDFLDNEENEDILEDIVLTLTLFEDREMIE |
| | | ERLKTYAHLFDDKVMKQLKRRRYTGWGRLSRKLINGIRDKQS |
| | | GKTILDFLKSDGFANRNFMQLIHDDSLTFKEDIQKAQVSGQGD |
| | | SLHEHIANLAGSPAIKKGILQTVKVVDELVKVMGRHKPENIVIE |
| | | MARENQTTQKGQKNSRERMKRIEEGIKELGSQILKEHPVENTQ |
| | | LQNEKLYLYYLQNGRDMYVDQELDINRLSDYDVDAIVPQSFL |
| | | KDDSIDNKVLTRSDKNRGKSDNVPSEEVVKKMKNYWRQLLN |
| | | AKLITQRKFDNLTKAERGGLSELDKAGFIKRQLVETRQITKHV |
| | | AQILDSRMNTKYDENDKLIREVKVITLKSKLVSDFRKDFQFYK |
| | | VREINNYHHAHDAYLNAVVGTALIKKYPKLESEFVYGDYKVY |
| | | DVRKMIAKSEQEIGKATAKYFFYSNIMNFFKTEITLANGEIRKR |
| | | PLIETNGETGEIVWDKGRDFATVRKVLSMPQVNIVKKTEVQTG |
| | | GFSKESILPKRNSDKLIARKKDWDPKKYGGFDSPTVAYSVLVV |
| | | AKVEKGKSKKLKSVKELLGITIMERSSFEKNPIDFLEAKGYKE |
| | | VKKDLIIKLPKYSLFELENGRKRMLASAGELQKGNELALPSKY |
| | | VNFLYLASHYEKLKGSPEDNEQKQLFVEQHKHYLDEIIEQISEF |
| | | SKRVILADANLDKVLSAYNKHRDKPIREQAENIIHLFTLTNLGA |
| | | PAAFKYFDTTIDRKRYTSTKEVLDATLIHQSITGLYETRIDLSQL |
| | | GGDSGGSSGGSKRTADGSEFESPKKKRKVSGGSSGGSTLNIED |
| | | EYRLHETSKEPDVSLGSTWLSDFPQAWAETGGMGLAVRQAPL |
| | | IIPLKATSTPVSIKQYPMSQEARLGIKPHIQRLLDQGILVPCQSP |
| | | WNTPLLPVKKPGTNDYRPVQDLREVNKRVEDIHPTVPNPYNL |
| | | LSGLPPSHQWYTVLDLKDAFFCLRLHPTSQPLFAFEWRDPEMG |
| | | ISGQLTWTRLPQGFKNSPTLFNEALHRDLADFRIQHPDLILLQY |
| | | VDDLLLAATSELDCQQGTRALLQTLGNLGYRASAKKAQICQK |
| | | QVKYLGYLLKEGQRWLTEARKETVMGQPTPKTPRQLREFLGK |
| | | AGFCRLFIPGFAEMAAPLYPLTKPGTLFNWGPDQQKAYQEIKQ |
| | | ALLTAPALGLPDLTKPFELFVDEKQGYAKGVLTQKLGPWRRP |
| | | VAYLSKKLDPVAAGWPPCLRMVAAIAVLTKDAGKLTMGQPL |
| | | VILAPHAVEALVKQPPDRWLSNARMTHYQALLLDTDRVQFGP |
| | | VVALNPATLLPLPEEGLQHNCLDILAEAHGTRPDLTDQPLPDA |
| | | DHTWYTDGSSLLQEGQRKAGAAVTTETEVIWAKALPAGTSA |
| | | QRAELIALTQALKMAEGKKLNVYTDSRYAFATAHIHGEIYRR |
| | | RGWLTSEGKEIKNKDEILALLKALFLPKRLSIIHCPGHQKGHSA |
| | | EARGNRMADQAARKAAITETPDTSTLLIENSSPSGGSKRTADG |
| | | SEFESPKKKRKVGSGPAAKRVKLD |
| 2289 | PEmax | DKKYSIGLDIGTNSVGWAVITDEYKVPSKKFKVLGNTDRHSIK |
| | CAS9 | KNLIGALLFDSGETAEATRLKRTARRRYTRRKNRICYLQEIFSN |
| | (R221K | EMAKVDDSFFHRLEESFLVEEDKKHERHPIFGNIVDEVAYHEK |
| | N394K | YPTIYHLRKKLVDSTDKADLRLIYLALAHMIKFRGHFLIEGDL |
| | H840A) (not | NPDNSDVDKLFIQLVQTYNQLFEENPINASGVDAKAILSARLS |
| | including | KSRKLENLIAQLPGEKKNGLFGNLIALSLGLTPNFKSNFDLAED |
| | N-terminal | AKLQLSKDTYDDDLDNLLAQIGDQYADLFLAAKNLSDAILLS |
| | Met in Cas9) | DILRVNTEITKAPLSASMIKRYDEHHQDLTLLKALVRQQLPEK |
| | | YKEIFFDQSKNGYAGYIDGGASQEEFYKFIKPILEKMDGTEELL |
| | | VKLKREDLLRKQRTFDNGSIPHQIHLGELHAILRRQEDFYPFLK |
| | | DNREKIEKILTFRIPYYVGPLARGNSRFAWMTRKSEETITPWNF |
| | | EEVVDKGASAQSFIERMTNFDKNLPNEKVLPKHSLLYEYFTVY |
| | | NELTKVKYVTEGMRKPAFLSGEQKKAIVDLLFKTNRKVTVKQ |
| | | LKEDYFKKIECFDSVEISGVEDRFNASLGTYHDLLKIIKDKDFL |
| | | DNEENEDILEDIVLTLTLFEDREMIEERLKTYAHLFDDKVMKQ |
| | | LKRRRYTGWGRLSRKLINGIRDKQSGKTILDFLKSDGFANRNF |
| | | MQLIHDDSLTFKEDIQKAQVSGQGDSLHEHIANLAGSPAIKKGI |
| | | LQTVKVVDELVKVMGRHKPENIVIEMARENQTTQKGQKNSRE |
| | | RMKRIEEGIKELGSQILKEHPVENTQLQNEKLYLYYLQNGRDM |
| | | YVDQELDINRLSDYDVDAIVPQSFLKDDSIDNKVLTRSDKNRG |
| | | KSDNVPSEEVVKKMKNYWRQLLNAKLITQRKFDNLTKAERG |
| | | GLSELDKAGFIKRQLVETRQITKHVAQILDSRMNTKYDENDKL |
| | | IREVKVITLKSKLVSDFRKDFQFYKVREINNYHHAHDAYLNAV |
| | | VGTALIKKYPKLESEFVYGDYKVYDVRKMIAKSEQEIGKATA |
| | | KYFFYSNIMNFFKTEITLANGEIRKRPLIETNGETGEIVWDKGR |
| | | DFATVRKVLSMPQVNIVKKTEVQTGGFSKESILPKRNSDKLIA |
| | | RKKDWDPKKYGGFDSPTVAYSVLVVAKVEKGKSKKLKSVKE |
| | | LLGITIMERSSFEKNPIDFLEAKGYKEVKKDLIIKLPKYSLFELE |
| | | NGRKRMLASAGELQKGNELALPSKYVNFLYLASHYEKLKGSP |
| | | EDNEQKQLFVEQHKHYLDEIIEQISEFSKRVILADANLDKVLSA |
| | | YNKHRDKPIREQAENIIHLFTLTNLGAPAAFKYFDTTIDRKRYT |
| | | STKEVLDATLIHQSITGLYETRIDLSQLGGD |
| 2387 | PEmax - | SGGSSGGSKRTADGSEFESPKKKRKVSGGSSGGS |
| | SGGSx2- | |
| | bpSV40NLS- | |
| | SGGSx2 | |
| | linker | |
| 2341 | PEmax-C- | SGGSKRTADGSEFESPKKKRKV |
| | terminal | |
| | linker-NLS | |
| 2342 | PEmax-C- | GSGPAAKRVKLD |
| | terminal | |
| | linker-NLS2 | |
| 2329 | Linker | (GGGGS)n |
| 2330 | Linker | (G)n |
| 2331 | Linker | (EAAAK)n |
| 2332 | Linker | (GGS)n |
| 2333 | Linker | (SGGS)n |
| 2334 | Linker | (XP)n |
| 2335 | Linker | SGSETPGTSESATPES |
| 2336 | Linker | SGGSSGGSSGSETPGTSESATPESSGGSSGGS |
| 2340 | Linker | SGGSSGGSSGSETPGTSESATPESSGGSSGGSS |
| | between | |
| | Cas9 domain | |
| | and RT | |
| | domain in | |
| | Exemplary | |
| | Prime Editor | |
| 2337 | Linker | SGGSGGSGGS |
| 2338 | Linker | SGGS |
| 2339 | Linker | SGGSSGGSSGSETPGTSESATPESAGSYPYDVPDYAGSAAPAA |
| | | KKKKLDGSGSGGSSGGS |
| 2389 | Linker | GGSGGS |
| 2388 | Linker | GGSGGSGGS |

Table 81 provides sequences referenced throughout the present disclosure.

The application's sequence listing, which the Patent Office published only in electronic form, follows.

SEQUENCE LISTING (2598 sequences)

SEQ ID NO: 1 - RNA, 20 nt, synthetic construct
  source 1..20: mol_type = other RNA
gcagagctgtgtgaccttgg

SEQ ID NO: 2 - RNA, 17 nt, synthetic construct
  source 1..17: mol_type = other RNA
gagctgtgtgaccttgg

SEQ ID NO: 3 - RNA, 18 nt, synthetic construct
  source 1..18: mol_type = other RNA
agagctgtgtgaccttgg

SEQ ID NO: 4 - RNA, 19 nt, synthetic construct
  source 1..19: mol_type = other RNA
cagagctgtgtgaccttgg

SEQ ID NO: 5 - RNA, 21 nt, synthetic construct
  source 1..21: mol_type = other RNA
cgcagagctgtgtgaccttgg

SEQ ID NO: 6 - RNA, 22 nt, synthetic construct
  source 1..22: mol_type = other RNA
ccgcagagctgtgtgaccttgg

SEQ ID NO: 7-11 - skipped (5 entries)

SEQ ID NO: 12 - RNA, 10 nt, synthetic construct
  source 1..10: mol_type = other RNA
aggtcacaca

SEQ ID NO: 13 - RNA, 11 nt, synthetic construct
  source 1..11: mol_type = other RNA
aggtcacacag

SEQ ID NO: 14 - RNA, 12 nt, synthetic construct
  source 1..12: mol_type = other RNA
aggtcacacagc

SEQ ID NO: 15 - RNA, 13 nt, synthetic construct
  source 1..13: mol_type = other RNA
aggtcacacagct

SEQ ID NO: 16 - RNA, 14 nt, synthetic construct
  source 1..14: mol_type = other RNA
aggtcacacagctc

SEQ ID NO: 17 - RNA, 15 nt, synthetic construct
  source 1..15: mol_type = other RNA
aggtcacacagctct

SEQ ID NO: 18 - RNA, 16 nt, synthetic construct
  source 1..16: mol_type = other RNA
aggtcacacagctctg

SEQ ID NO: 19 - RNA, 17 nt, synthetic construct
  source 1..17: mol_type = other RNA
aggtcacacagctctgc

SEQ ID NO: 20 - RNA, 18 nt, synthetic construct
  source 1..18: mol_type = other RNA
aggtcacacagctctgcg

SEQ ID NO: 21 - RNA, 19 nt, synthetic construct
  source 1..19: mol_type = other RNA
aggtcacacagctctgcgg

SEQ ID NO: 22 - RNA, 144 nt, synthetic construct
  source 1..144: mol_type = other RNA
gcagagctgtgtgaccttgggttttagagctagaaatagcaagttaaaataaggctagtccgttatcaacttgaaaaagtggcaccgagtcggtgcggcttgtcgacgacggcggtctccgtcgtcaggatcataggtcacaca

SEQ ID NO: 23 - RNA, 151 nt, synthetic construct
  source 1..151: mol_type = other RNA
gcagagctgtgtgaccttgggttttagagctagaaatagcaagttaaaataaggctagtccgttatcaacttgaaaaagtggcaccgagtcggtgcggcttgtcgacgacggcggtctccgtcgtcaggatcataggtcacacattttttt

SEQ ID NO: 24 - RNA, 146 nt, synthetic construct
  source 1..146: mol_type = other RNA
gcagagctgtgtgaccttgggttttagagctagaaatagcaagttaaaataaggctagtccgttatcaacttgaaaaagtggcaccgagtcggtgcggcttgtcgacgacggcggtctccgtcgtcaggatcataggtcacacagc

SEQ ID NO: 25 - RNA, 154 nt, synthetic construct
  source 1..154: mol_type = other RNA
gcagagctgtgtgaccttgggttttagagctagaaatagcaagttaaaataaggctagtccgttatcaacttgaaaaagtggcaccgagtcggtgcggcttgtcgacgacggcggtctccgtcgtcaggatcataggtcacacagcattttttt

SEQ ID NO: 26 - RNA, 124 nt, synthetic construct
  source 1..124: mol_type = other RNA
gcagagctgtgtgaccttgggttttagagctagaaatagcaagttaaaataaggctagtccgttatcaacttgaaaaagtggcaccgagtcggtgctaagtcaaatgagactttaggtcacaca

SEQ ID NO: 27 - RNA, 131 nt, synthetic construct
  source 1..131: mol_type = other RNA
gcagagctgtgtgaccttgggttttagagctagaaatagcaagttaaaataaggctagtccgttatcaacttgaaaaagtggcaccgagtcggtgctaagtcaaatgagactttaggtcacacattttttt

SEQ ID NO: 28 - RNA, 124 nt, synthetic construct
  source 1..124: mol_type = other RNA
gcagagctgtgtgaccttgggttttagagctagaaatagcaagttaaaataaggctagtccgttatcaacttgaaaaagtggcaccgagtcggtgcaatttcaagatcctgcctaggtcacaca

SEQ ID NO: 29 - RNA, 131 nt, synthetic construct
  source 1..131: mol_type = other RNA
gcagagctgtgtgaccttgggttttagagctagaaatagcaagttaaaataaggctagtccgttatcaacttgaaaaagtggcaccgagtcggtgcaatttcaagatcctgcctaggtcacacattttttt

SEQ ID NO: 30 - RNA, 124 nt, synthetic construct
  source 1..124: mol_type = other RNA
gcagagctgtgtgaccttgggttttagagctagaaatagcaagttaaaataaggctagtccgttatcaacttgaaaaagtggcaccgagtcggtgcttgctctctgccatgtacaggtcacaca

SEQ ID NO: 31 - RNA, 131 nt, synthetic construct
  source 1..131: mol_type = other RNA
gcagagctgtgtgaccttgggttttagagctagaaatagcaagttaaaataaggctagtccgttatcaacttgaaaaagtggcaccgagtcggtgcttgctctctgccatgtacaggtcacacattttttt

SEQ ID NO: 32 - RNA, 121 nt, synthetic construct
  source 1..121: mol_type = other RNA
gcagagctgtgtgaccttgggttttagagctagaaatagcaagttaaaataaggctagtccgttatcaacttgaaaaagtggcaccgagtcggtgcacctttggccgttctaggtcacaca

SEQ ID NO: 33 - RNA, 128 nt, synthetic construct
  source 1..128: mol_type = other RNA
gcagagctgtgtgaccttgggttttagagctagaaatagcaagttaaaataaggctagtccgttatcaacttgaaaaagtggcaccgagtcggtgcacctttggccgttctaggtcacacattttttt

SEQ ID NO: 34 - RNA, 124 nt, synthetic construct
  source 1..124: mol_type = other RNA
gcagagctgtgtgaccttgggttttagagctagaaatagcaagttaaaataaggctagtccgttatcaacttgaaaaagtggcaccgagtcggtgctctgccctcctcttgggtaggtcacaca

SEQ ID NO: 35 - RNA, 131 nt, synthetic construct
  source 1..131: mol_type = other RNA
gcagagctgtgtgaccttgggttttagagctagaaatagcaagttaaaataaggctagtccgttatcaacttgaaaaagtggcaccgagtcggtgctctgccctcctcttgggtaggtcacacattttttt

SEQ ID NO: 36 - RNA, 121 nt, synthetic construct
  source 1..121: mol_type = other RNA
gcagagctgtgtgaccttgggttttagagctagaaatagcaagttaaaataaggctagtccgttatcaacttgaaaaagtggcaccgagtcggtgcatgtacgggccgtccaggtcacaca

SEQ ID NO: 37 - RNA, 128 nt, synthetic construct
  source 1..128: mol_type = other RNA
gcagagctgtgtgaccttgggttttagagctagaaatagcaagttaaaataaggctagtccgttatcaacttgaaaaagtggcaccgagtcggtgcatgtacgggccgtccaggtcacacattttttt

SEQ ID NO: 38 - RNA, 124 nt, synthetic construct
  source 1..124: mol_type = other RNA
gcagagctgtgtgaccttgggttttagagctagaaatagcaagttaaaataaggctagtccgttatcaacttgaaaaagtggcaccgagtcggtgcggcctggacgccaggcctaggtcacaca

SEQ ID NO: 39 - RNA, 131 nt, synthetic construct
  source 1..131: mol_type = other RNA
gcagagctgtgtgaccttgggttttagagctagaaatagcaagttaaaataaggctagtccgttatcaacttgaaaaagtggcaccgagtcggtgcggcctggacgccaggcctaggtcacacattttttt

SEQ ID NO: 40 - RNA, 121 nt, synthetic construct
  source 1..121: mol_type = other RNA
gcagagctgtgtgaccttgggttttagagctagaaatagcaagttaaaataaggctagtccgttatcaacttgaaaaagtggcaccgagtcggtgctgccgcacggcggctaggtcacaca

SEQ ID NO: 41 - RNA, 128 nt, synthetic construct
  source 1..128: mol_type = other RNA
gcagagctgtgtgaccttgggttttagagctagaaatagcaagttaaaataaggctagtccgttatcaacttgaaaaagtggcaccgagtcggtgctgccgcacggcggctaggtcacacattttttt

SEQ ID NO: 42 - RNA, 128 nt, synthetic construct
  source 1..128: mol_type = other RNA
gcagagctgtgtgaccttgggttttagagctagaaatagcaagttaaaataaggctagtccgttatcaacttgaaaaagtggcaccgagtcggtgcttggagtttgctctgtgtatgaaggtcacaca

SEQ ID NO: 43 - RNA, 135 nt, synthetic construct
  source 1..135: mol_type = other RNA
gcagagctgtgtgaccttgggttttagagctagaaatagcaagttaaaataaggctagtccgttatcaacttgaaaaagtggcaccgagtcggtgcttggagtttgctctgtgtatgaaggtcacacattttttt

SEQ ID NO: 44 - RNA, 126 nt, synthetic construct
  source 1..126: mol_type = other RNA
gcagagctgtgtgaccttgggttttagagctagaaatagcaagttaaaataaggctagtccgttatcaacttgaaaaagtggcaccgagtcggtgctttacactagatggtgctgtaggtcacaca

SEQ ID NO: 45 - RNA, 133 nt, synthetic construct
  source 1..133: mol_type = other RNA
gcagagctgtgtgaccttgggttttagagctagaaatagcaagttaaaataaggctagtccgttatcaacttgaaaaagtggcaccgagtcggtgctttacactagatggtgctgtaggtcacacattttttt

SEQ ID NO: 46 - RNA, 126 nt, synthetic construct
  source 1..126: mol_type = other RNA
gcagagctgtgtgaccttgggttttagagctagaaatagcaagttaaaataaggctagtccgttatcaacttgaaaaagtggcaccgagtcggtgcacttcacatccagtgacgagaggtcacaca

SEQ ID NO: 47 - RNA, 133 nt, synthetic construct
  source 1..133: mol_type = other RNA
gcagagctgtgtgaccttgggttttagagctagaaatagcaagttaaaataaggctagtccgttatcaacttgaaaaagtggcaccgagtcggtgcacttcacatccagtgacgagaggtcacacattttttt

SEQ ID NO: 48 - RNA, 128 nt, synthetic construct
  source 1..128: mol_type = other RNA
gcagagctgtgtgaccttgggttttagagctagaaatagcaagttaaaataaggctagtccgttatcaacttgaaaaagtggcaccgagtcggtgcgcggtatcacctacgacatcaaaggtcacaca

SEQ ID NO: 49 - RNA, 135 nt, synthetic construct
  source 1..135: mol_type = other RNA
gcagagctgtgtgaccttgggttttagagctagaaatagcaagttaaaataaggctagtccgttatcaacttgaaaaagtggcaccgagtcggtgcgcggtatcacctacgacatcaaaggtcacacattttttt

SEQ ID NO: 50 - RNA, 126 nt, synthetic construct
  source 1..126: mol_type = other RNA
gcagagctgtgtgaccttgggttttagagctagaaatagcaagttaaaataaggctagtccgttatcaacttgaaaaagtggcaccgagtcggtgcctgcccctgagggacgatccaggtcacaca

SEQ ID NO: 51 - RNA, 133 nt, synthetic construct
  source 1..133: mol_type = other RNA
gcagagctgtgtgaccttgggttttagagctagaaatagcaagttaaaataaggctagtccgttatcaacttgaaaaagtggcaccgagtcggtgcctgcccctgagggacgatccaggtcacacattttttt

SEQ ID NO: 52 - RNA, 129 nt, synthetic construct
  source 1..129: mol_type = other RNA
gcagagctgtgtgaccttgggttttagagctagaaatagcaagttaaaataaggctagtccgttatcaacttgaaaaagtggcaccgagtcggtgcgggtctgatgcccgagaccacgaaggtcacaca

SEQ ID NO: 53 - RNA, 136 nt, synthetic construct
  source 1..136: mol_type = other RNA
gcagagctgtgtgaccttgggttttagagctagaaatagcaagttaaaataaggctagtccgttatcaacttgaaaaagtggcaccgagtcggtgcgggtctgatgcccgagaccacgaaggtcacacattttttt

SEQ ID NO: 54 - RNA, 126 nt, synthetic construct
  source 1..126: mol_type = other RNA
gcagagctgtgtgaccttgggttttagagctagaaatagcaagttaaaataaggctagtccgttatcaacttgaaaaagtggcaccgagtcggtgcgccccacgggccgagtgcggaggtcacaca

SEQ ID NO: 55 - RNA, 133 nt, synthetic construct
  source 1..133: mol_type = other RNA
gcagagctgtgtgaccttgggttttagagctagaaatagcaagttaaaataaggctagtccgttatcaacttgaaaaagtggcaccgagtcggtgcgccccacgggccgagtgcggaggtcacacattttttt

SEQ ID NO: 56 - RNA, 136 nt, synthetic construct
  source 1..136: mol_type = other RNA
gcagagctgtgtgaccttgggttttagagctagaaatagcaagttaaaataaggctagtccgttatcaacttgaaaaagtggcaccgagtcggtgctaactgctctatatacgagattatcaaatcaggtcacaca

SEQ ID NO: 57 - RNA, 143 nt, synthetic construct
  source 1..143: mol_type = other RNA
gcagagctgtgtgaccttgggttttagagctagaaatagcaagttaaaataaggctagtccgttatcaacttgaaaaagtggcaccgagtcggtgctaactgctctatatacgagattatcaaatcaggtcacacattttttt

SEQ ID NO: 58 - RNA, 136 nt, synthetic construct
  source 1..136: mol_type = other RNA
gcagagctgtgtgaccttgggttttagagctagaaatagcaagttaaaataaggctagtccgttatcaacttgaaaaagtggcaccgagtcggtgcggtaacgtaatacaaggaaacatgagacacaggtcacaca

SEQ ID NO: 59 - RNA, 143 nt, synthetic construct
  source 1..143: mol_type = other RNA
gcagagctgtgtgaccttgggttttagagctagaaatagcaagttaaaataaggctagtccgttatcaacttgaaaaagtggcaccgagtcggtgcggtaacgtaatacaaggaaacatgagacacaggtcacacattttttt

SEQ ID NO: 60 - RNA, 136 nt, synthetic construct
  source 1..136: mol_type = other RNA
gcagagctgtgtgaccttgggttttagagctagaaatagcaagttaaaataaggctagtccgttatcaacttgaaaaagtggcaccgagtcggtgccaagttgtgcccctagtgagcttggattacaggtcacaca

SEQ ID NO: 61 - RNA, 143 nt, synthetic construct
  source 1..143: mol_type = other RNA
gcagagctgtgtgaccttgggttttagagctagaaatagcaagttaaaataaggctagtccgttatcaacttgaaaaagtggcaccgagtcggtgccaagttgtgcccctagtgagcttggattacaggtcacacattttttt

SEQ ID NO: 62 - RNA, 136 nt, synthetic construct
  source 1..136: mol_type = other RNA
gcagagctgtgtgaccttgggttttagagctagaaatagcaagttaaaataaggctagtccgttatcaacttgaaaaagtggcaccgagtcggtgcgcgcgaacctgggatcgccatgcatgatagaggtcacaca

SEQ ID NO: 63 - RNA, 143 nt, synthetic construct
  source 1..143: mol_type = other RNA
gcagagctgtgtgaccttgggttttagagctagaaatagcaagttaaaataaggctagtccgttatcaacttgaaaaagtggcaccgagtcggtgcgcgcgaacctgggatcgccatgcatgatagaggtcacacattttttt

SEQ ID NO: 64 - RNA, 144 nt, synthetic construct
  source 1..144: mol_type = other RNA
gcagagctgtgtgaccttgggttttagagctagaaatagcaagttaaaataaggctagtccgttatcaacttgaaaaagtggcaccgagtcggtgcatgatcctgacgacggagaccgccgtcgtcgacaagccaggtcacaca

SEQ ID NO: 65 - RNA, 151 nt, synthetic construct
  source 1..151: mol_type = other RNA
gcagagctgtgtgaccttgggttttagagctagaaatagcaagttaaaataaggctagtccgttatcaacttgaaaaagtggcaccgagtcggtgcatgatcctgacgacggagaccgccgtcgtcgacaagccaggtcacacattttttt

SEQ ID NO: 66 - RNA, 142 nt, synthetic construct
  source 1..142: mol_type = other RNA
gcagagctgtgtgaccttgggttttagagctagaaatagcaagttaaaataaggctagtccgttatcaacttgaaaaagtggcaccgagtcggtgcggcttgtcgacgacggcggtctccgtcgtcaggatcataggtcaca

SEQ ID NO: 67 - RNA, 149 nt, synthetic construct
  source 1..149: mol_type = other RNA
gcagagctgtgtgaccttgggttttagagctagaaatagcaagttaaaataaggctagtccgttatcaacttgaaaaagtggcaccgagtcggtgcggcttgtcgacgacggcggtctccgtcgtcaggatcataggtcacattttttt

SEQ ID NO: 68 - RNA, 143 nt, synthetic construct
  source 1..143: mol_type = other RNA
gcagagctgtgtgaccttgggttttagagctagaaatagcaagttaaaataaggctagtccgttatcaacttgaaaaagtggcaccgagtcggtgcggcttgtcgacgacggcggtctccgtcgtcaggatcataggtcacac

SEQ ID NO: 69 - RNA, 150 nt, synthetic construct
  source 1..150: mol_type = other RNA
gcagagctgtgtgaccttgggttttagagctagaaatagcaagttaaaataaggctagtccgttatcaacttgaaaaagtggcaccgagtcggtgcggcttgtcgacgacggcggtctccgtcgtcaggatcataggtcacacttttttt

SEQ ID NO: 70 - RNA, 145 nt, synthetic construct
  source 1..145: mol_type = other RNA
gcagagctgtgtgaccttgggttttagagctagaaatagcaagttaaaataaggctagtccgttatcaacttgaaaaagtggcaccgagtcggtgcggcttgtcgacgacggcggtctccgtcgtcaggatcataggtcacacag

SEQ ID NO: 71 - RNA, 152 nt, synthetic construct
  source 1..152: mol_type = other RNA
gcagagctgtgtgaccttgggttttagagctagaaatagcaagttaaaataaggctagtccgttatcaacttgaaaaagtggcaccgagtcggtgcggcttgtcgacgacggcggtctccgtcgtcaggatcataggtcacacagttttttt

SEQ ID NO: 72 - RNA, 153 nt, synthetic construct
  source 1..153: mol_type = other RNA
gcagagctgtgtgaccttgggttttagagctagaaatagcaagttaaaataaggctagtccgttatcaacttgaaaaagtggcaccgagtcggtgcggcttgtcgacgacggcggtctccgtcgtcaggatcataggtcacacagcttttttt

SEQ ID NO: 73 - RNA, 147 nt, synthetic construct
  source 1..147: mol_type = other RNA
gcagagctgtgtgaccttgggttttagagctagaaatagcaagttaaaataaggctagtccgttatcaacttgaaaaagtggcaccgagtcggtgcggcttgtcgacgacggcggtctccgtcgtcaggatcataggtcacacagct

SEQ ID NO: 74 - RNA, 154 nt, synthetic construct
  source 1..154: mol_type = other RNA
gcagagctgtgtgaccttgggttttagagctagaaatagcaagttaaaataaggctagtccgttatcaacttgaaaaagtggcaccgagtcggtgcggcttgtcgacgacggcggtctccgtcgtcaggatcataggtcacacagctttttttt

SEQ ID NO: 75 - RNA, 148 nt, synthetic construct
  source 1..148: mol_type = other RNA
gcagagctgtgtgaccttgggttttagagctagaaatagcaagttaaaataaggctagtccgttatcaacttgaaaaagtggcaccgagtcggtgcggcttgtcgacgacggcggtctccgtcgtcaggatcataggtcacacagctc

SEQ ID NO: 76 - RNA, 155 nt, synthetic construct
  source 1..155: mol_type = other RNA
gcagagctgtgtgaccttgggttttagagctagaaatagcaagttaaaataaggctagtccgttatcaacttgaaaaagtggcaccgagtcggtgcggcttgtcgacgacggcggtctccgtcgtcaggatcataggtcacacagctcttttttt

SEQ ID NO: 77 - RNA, 149 nt, synthetic construct
  source 1..149: mol_type = other RNA
gcagagctgtgtgaccttgggttttagagctagaaatagcaagttaaaataaggctagtccgttatcaacttgaaaaagtggcaccgagtcggtgcggcttgtcgacgacggcggtctccgtcgtcaggatcataggtcacacagctct

SEQ ID NO: 78 - RNA, 156 nt, synthetic construct
  source 1..156: mol_type = other RNA
gcagagctgtgtgaccttgggttttagagctagaaatagcaagttaaaataaggctagtccgttatcaacttgaaaaagtggcaccgagtcggtgcggcttgtcgacgacggcggtctccgtcgtcaggatcataggtcacacagctctttttttt

SEQ ID NO: 79 - RNA, 150 nt, synthetic construct
  source 1..150: mol_type = other RNA
gcagagctgtgtgaccttgggttttagagctagaaatagcaagttaaaataaggctagtccgttatcaacttgaaaaagtggcaccgagtcggtgcggcttgtcgacgacggcggtctccgtcgtcaggatcataggtcacacagctctg

SEQ ID NO: 80 - RNA, 157 nt, synthetic construct
  source 1..157: mol_type = other RNA
gcagagctgtgtgaccttgggttttagagctagaaatagcaagttaaaataaggctagtccgttatcaacttgaaaaagtggcaccgagtcggtgcggcttgtcgacgacggcggtctccgtcgtcaggatcataggtcacacagctctgttttttt

SEQ ID NO: 81 - RNA, 151 nt, synthetic construct
  source 1..151: mol_type = other RNA
gcagagctgtgtgaccttgggttttagagctagaaatagcaagttaaaataaggctagtccgttatcaacttgaaaaagtggcaccgagtcggtgcggcttgtcgacgacggcggtctccgtcgtcaggatcataggtcacacagctctgc

SEQ ID NO: 82 - RNA, 158 nt, synthetic construct
  source 1..158: mol_type = other RNA
gcagagctgtgtgaccttgggttttagagctagaaatagcaagttaaaataaggctagtccgttatcaacttgaaaaagtggcaccgagtcggtgcggcttgtcgacgacggcggtctccgtcgtcaggatcataggtcacacagctctgcttttttt

SEQ ID NO: 83 - RNA, 145 nt, synthetic construct
  source 1..145: mol_type = other RNA
gcagagctgtgtgaccttgggtttaagagcggggaaatccgcaagtttaaataaggctagtccgttatcagcgtgaaaacgcggcaccgagtcggtgcggcttgtcgacgacggcggtctccgtcgtcaggatcataggtcacac

SEQ ID NO: 84 - RNA, 152 nt, synthetic construct
  source 1..152: mol_type = other RNA
gcagagctgtgtgaccttgggtttaagagcggggaaatccgcaagtttaaataaggctagtccgttatcagcgtgaaaacgcggcaccgagtcggtgcggcttgtcgacgacggcggtctccgtcgtcaggatcataggtcacacttttttt

SEQ ID NO: 85 - RNA, 186 nt, synthetic construct
  source 1..186: mol_type = other RNA
gcagagctgtgtgaccttgggttttagagctagaaatagcaagttaaaataaggctagtccgttatcaacttgaaaaagtggcaccgagtcggtgcggcttgtcgacgacggcggtctccgtcgtcaggatcataggtcacacgtagatcgcggttctatctagttacgcgttaaaccaactagaa

SEQ ID NO: 86 - RNA, 193 nt, synthetic construct
  source 1..193: mol_type = other RNA
gcagagctgtgtgaccttgggttttagagctagaaatagcaagttaaaataaggctagtccgttatcaacttgaaaaagtggcaccgagtcggtgcggcttgtcgacgacggcggtctccgtcgtcaggatcataggtcacacgtagatcgcggttctatctagttacgcgttaaaccaactagaattttttt

SEQ ID NO: 87 - RNA, 186 nt, synthetic construct
  source 1..186: mol_type = other RNA
gcagagctgtgtgaccttgggttttagagctagaaatagcaagttaaaataaggctagtccgttatcaacttgaaaaagtggcaccgagtcggtgcggcttgtcgacgacggcggtctccgtcgtcaggatcataggtcacacatcgatcgcggttctatctagttacgcgttaaaccaactagaa

SEQ ID NO: 88 - RNA, 193 nt, synthetic construct
  source 1..193: mol_type = other RNA
gcagagctgtgtgaccttgggttttagagctagaaatagcaagttaaaataaggctagtccgttatcaacttgaaaaagtggcaccgagtcggtgcggcttgtcgacgacggcggtctccgtcgtcaggatcataggtcacacatcgatcgcggttctatctagttacgcgttaaaccaactagaattttttt

SEQ ID NO: 89 - RNA, 188 nt, synthetic construct
  source 1..188: mol_type = other RNA
gcagagctgtgtgaccttgggtttaagagcggggaaatccgcaagtttaaataaggctagtccgttatcagcgtgaaaacgcggcaccgagtcggtgcggcttgtcgacgacggcggtctccgtcgtcaggatcataggtcacacaagagtcgcggttctatctagttacgcgttaaaccaactagaa

SEQ ID NO: 90 - RNA, 195 nt, synthetic construct
  source 1..195: mol_type = other RNA
gcagagctgtgtgaccttgggtttaagagcggggaaatccgcaagtttaaataaggctagtccgttatcagcgtgaaaacgcggcaccgagtcggtgcggcttgtcgacgacggcggtctccgtcgtcaggatcataggtcacacaagagtcgcggttctatctagttacgcgttaaaccaactagaattttttt

SEQ ID NO: 91 - RNA, 188 nt, synthetic construct
  source 1..188: mol_type = other RNA
gcagagctgtgtgaccttgggtttaagagcggggaaatccgcaagtttaaataaggctagtccgttatcagcgtgaaaacgcggcaccgagtcggtgcggcttgtcgacgacggcggtctccgtcgtcaggatcataggtcacacatacgtcgcggttctatctagttacgcgttaaaccaactagaa

SEQ ID NO: 92 - RNA, 195 nt, synthetic construct
  source 1..195: mol_type = other RNA
gcagagctgtgtgaccttgggtttaagagcggggaaatccgcaagtttaaataaggctagtccgttatcagcgtgaaaacgcggcaccgagtcggtgcggcttgtcgacgacggcggtctccgtcgtcaggatcataggtcacacatacgtcgcggttctatctagttacgcgttaaaccaactagaattttttt

SEQ ID NO: 93 - RNA, 145 nt, synthetic construct
  source 1..145: mol_type = other RNA
gcagagctgtgtgaccttgggtataagagcggggaaatccgcatgtttatataaggctagtccgttatcagcgtgaaagcgcggcaccgaatcggtgtggcttgtcgacgacggcggtctccgtcgtcaggatcataggtcacac

SEQ ID NO: 94 - RNA, 152 nt, synthetic construct
  source 1..152: mol_type = other RNA
gcagagctgtgtgaccttgggtataagagcggggaaatccgcatgtttatataaggctagtccgttatcagcgtgaaagcgcggcaccgaatcggtgtggcttgtcgacgacggcggtctccgtcgtcaggatcataggtcacacttttttt

SEQ ID NO: 95 - RNA, 145 nt, synthetic construct
  source 1..145: mol_type = other RNA
gcagagctgtgtgaccttgggtataagagcggggaaatccgcatgtttatataaggctagtccgttatcagcgtgaaagcgcggcaccgagtcggtgtggcttgtcgacgacggcggtctccgtcgtcaggatcataggtcacac

SEQ ID NO: 96 - RNA, 152 nt, synthetic construct
  source 1..152: mol_type = other RNA
gcagagctgtgtgaccttgggtataagagcggggaaatccgcatgtttatataaggctagtccgttatcagcgtgaaagcgcggcaccgagtcggtgtggcttgtcgacgacggcggtctccgtcgtcaggatcataggtcacacttttttt

SEQ ID NO: 97 - skipped

SEQ ID NO: 98 - RNA, 148 nt, synthetic construct
  source 1..148: mol_type = other RNA
gcagagctgtgtgaccttgggttttagagctagaaatagcaagttaaaataaggctagtccgttatcaacttgaaaaagtggcaccgagtcggtgcggcttgtcgacgacggcggtctccgtcgtcaggatcataggtcacacatttt

SEQ ID NO: 99 - RNA, 151 nt, synthetic construct
  source 1..151: mol_type = other RNA
gcagagctgtgtgaccttgggttttagagctagaaatagcaagttaaaataaggctagtccgttatcaacttgaaaaagtggcaccgagtcggtgcggcttgtcgacgacggcggtctccgtcgtcaggatcataggtcacacagcatttt

SEQ ID NO: 100 - RNA, 147 nt, synthetic construct
  source 1..147: mol_type = other RNA
gcagagctgtgtgaccttgggttttagagctagaaatagcaagttaaaataaggctagtccgttatcaacttgaaaaagtggcaccgagtcggtgcggcttgtcgacgacggcggtctccgtcgtcaggatcataggtcacacagca

SEQ ID NO: 101 - RNA, 20 nt, synthetic construct
  source 1..20: mol_type = other RNA
tatctgacccagttacgcca

SEQ ID NO: 102 - RNA, 17 nt, synthetic construct
  source 1..17: mol_type = other RNA
ctgacccagttacgcca

SEQ ID NO: 103 - RNA, 18 nt, synthetic construct
  source 1..18: mol_type = other RNA
tctgacccagttacgcca

SEQ ID NO: 104 - RNA, 19 nt, synthetic construct
  source 1..19: mol_type = other RNA
atctgacccagttacgcca

SEQ ID NO: 105 - RNA, 21 nt, synthetic construct
  source 1..21: mol_type = other RNA
atatctgacccagttacgcca

SEQ ID NO: 106 - RNA, 22 nt, synthetic construct
  source 1..22: mol_type = other RNA
aatatctgacccagttacgcca

SEQ ID NO: 107-111 - skipped (5 entries)

SEQ ID NO: 112 - RNA, 10 nt, synthetic construct
  source 1..10: mol_type = other RNA
cgtaactggg

SEQ ID NO: 113 - RNA, 11 nt, synthetic construct
  source 1..11: mol_type = other RNA
cgtaactgggt

SEQ ID NO: 114 - RNA, 12 nt, synthetic construct
  source 1..12: mol_type = other RNA
cgtaactgggtc

SEQ ID NO: 115 - RNA, 13 nt, synthetic construct
  source 1..13: mol_type = other RNA
cgtaactgggtca

SEQ ID NO: 116 - RNA, 14 nt, synthetic construct
  source 1..14: mol_type = other RNA
cgtaactgggtcag

SEQ ID NO: 117 - RNA, 15 nt, synthetic construct
  source 1..15: mol_type = other RNA
cgtaactgggtcaga

SEQ ID NO: 118 - RNA, 16 nt, synthetic construct
  source 1..16: mol_type = other RNA
cgtaactgggtcagat

SEQ ID NO: 119 - RNA, 17 nt, synthetic construct
  source 1..17: mol_type = other RNA
cgtaactgggtcagata

SEQ ID NO: 120 - RNA, 18 nt, synthetic construct
  source 1..18: mol_type = other RNA
cgtaactgggtcagatat

SEQ ID NO: 121 - RNA, 19 nt, synthetic construct
  source 1..19: mol_type = other RNA
cgtaactgggtcagatatt

SEQ ID NO: 122 - RNA, 144 nt, synthetic construct
  source 1..144: mol_type = other RNA
tatctgacccagttacgccagttttagagctagaaatagcaagttaaaataaggctagtccgttatcaacttgaaaaagtggcaccgagtcggtgcggcttgtcgacgacggcggtctccgtcgtcaggatcatcgtaactggg

SEQ ID NO: 123 - RNA, 152 nt, synthetic construct
  source 1..152: mol_type = other RNA
gtatctgacccagttacgccagttttagagctagaaatagcaagttaaaataaggctagtccgttatcaacttgaaaaagtggcaccgagtcggtgcggcttgtcgacgacggcggtctccgtcgtcaggatcatcgtaactgggttttttt

SEQ ID NO: 124 - RNA, 146 nt, synthetic construct
  source 1..146: mol_type = other RNA
tatctgacccagttacgccagttttagagctagaaatagcaagttaaaataaggctagtccgttatcaacttgaaaaagtggcaccgagtcggtgcggcttgtcgacgacggcggtctccgtcgtcaggatcatcgtaactgggtc

SEQ ID NO: 125 - RNA, 154 nt, synthetic construct
  source 1..154: mol_type = other RNA
gtatctgacccagttacgccagttttagagctagaaatagcaagttaaaataaggctagtccgttatcaacttgaaaaagtggcaccgagtcggtgcggcttgtcgacgacggcggtctccgtcgtcaggatcatcgtaactgggtcttttttt

SEQ ID NO: 126 - RNA, 124 nt, synthetic construct
  source 1..124: mol_type = other RNA
tatctgacccagttacgccagttttagagctagaaatagcaagttaaaataaggctagtccgttatcaacttgaaaaagtggcaccgagtcggtgctaagtcaaatgagactttcgtaactggg

SEQ ID NO: 127 - RNA, 132 nt, synthetic construct
  source 1..132: mol_type = other RNA
gtatctgacccagttacgccagttttagagctagaaatagcaagttaaaataaggctagtccgttatcaacttgaaaaagtggcaccgagtcggtgctaagtcaaatgagactttcgtaactgggttttttt

SEQ ID NO: 128 - RNA, 124 nt, synthetic construct
  source 1..124: mol_type = other RNA
tatctgacccagttacgccagttttagagctagaaatagcaagttaaaataaggctagtccgttatcaacttgaaaaagtggcaccgagtcggtgcaatttcaagatcctgcctcgtaactggg

SEQ ID NO: 129 - RNA, 132 nt, synthetic construct
  source 1..132: mol_type = other RNA
gtatctgacccagttacgccagttttagagctagaaatagcaagttaaaataaggctagtccgttatcaacttgaaaaagtggcaccgagtcggtgcaatttcaagatcctgcctcgtaactgggttttttt

SEQ ID NO: 130 - RNA, 124 nt, synthetic construct
  source 1..124: mol_type = other RNA
tatctgacccagttacgccagttttagagctagaaatagcaagttaaaataaggctagtccgttatcaacttgaaaaagtggcaccgagtcggtgcttgctctctgccatgtaccgtaactggg

SEQ ID NO: 131 - RNA, 132 nt, synthetic construct
  source 1..132: mol_type = other RNA
gtatctgacccagttacgccagttttagagctagaaatagcaagttaaaataaggctagtccgttatcaacttgaaaaagtggcaccgagtcggtgcttgctctctgccatgtaccgtaactgggttttttt

SEQ ID NO: 132 - RNA, 121 nt, synthetic construct
  source 1..121: mol_type = other RNA
tatctgacccagttacgccagttttagagctagaaatagcaagttaaaataaggctagtccgttatcaacttgaaaaagtggcaccgagtcggtgcacctttggccgttctcgtaactggg

SEQ ID NO: 133 - RNA, 129 nt, synthetic construct
  source 1..129: mol_type = other RNA
gtatctgacccagttacgccagttttagagctagaaatagcaagttaaaataaggctagtccgttatcaacttgaaaaagtggcaccgagtcggtgcacctttggccgttctcgtaactgggttttttt

SEQ ID NO: 134 - RNA, 124 nt, synthetic construct
  source 1..124: mol_type = other RNA
tatctgacccagttacgccagttttagagctagaaatagcaagttaaaataaggctagtccgttatcaacttgaaaaagtggcaccgagtcggtgctctgccctcctcttgggtcgtaactggg

SEQ ID NO: 135 - RNA, 132 nt, synthetic construct
  source 1..132: mol_type = other RNA
gtatctgacccagttacgccagttttagagctagaaatagcaagttaaaataaggctagtccgttatcaacttgaaaaagtggcaccgagtcggtgctctgccctcctcttgggtcgtaactgggttttttt

SEQ ID NO: 136 - RNA, 121 nt, synthetic construct
  source 1..121: mol_type = other RNA
tatctgacccagttacgccagttttagagctagaaatagcaagttaaaataaggctagtccgttatcaacttgaaaaagtggcaccgagtcggtgcatgtacgggccgtcccgtaactggg

SEQ ID NO: 137 - RNA, 129 nt, synthetic construct
  source 1..129: mol_type = other RNA
gtatctgacccagttacgccagttttagagctagaaatagcaagttaaaataaggctagtccgttatcaacttgaaaaagtggcaccgagtcggtgcatgtacgggccgtcccgtaactgggttttttt

SEQ ID NO: 138 - RNA, 124 nt, synthetic construct
  source 1..124: mol_type = other RNA
tatctgacccagttacgccagttttagagctagaaatagcaagttaaaataaggctagtccgttatcaacttgaaaaagtggcaccgagtcggtgcggcctggacgccaggcctcgtaactggg

SEQ ID NO: 139 - RNA, 132 nt, synthetic construct
  source 1..132: mol_type = other RNA
gtatctgacccagttacgccagttttagagctagaaatagcaagttaaaataaggctagtccgttatcaacttgaaaaagtggcaccgagtcggtgcggcctggacgccaggcctcgtaactgggttttttt

SEQ ID NO: 140 - RNA, 121 nt, synthetic construct
  source 1..121: mol_type = other RNA
tatctgacccagttacgccagttttagagctagaaatagcaagttaaaataaggctagtccgttatcaacttgaaaaagtggcaccgagtcggtgctgccgcacggcggctcgtaactggg

SEQ ID NO: 141 - RNA, 129 nt, synthetic construct
  source 1..129: mol_type = other RNA
gtatctgacccagttacgccagttttagagctagaaatagcaagttaaaataaggctagtccgttatcaacttgaaaaagtggcaccgagtcggtgctgccgcacggcggctcgtaactgggttttttt

SEQ ID NO: 142 - RNA, 128 nt, synthetic construct
  source 1..128: mol_type = other RNA
tatctgacccagttacgccagttttagagctagaaatagcaagttaaaataaggctagtccgttatcaacttgaaaaagtggcaccgagtcggtgcttggagtttgctctgtgtatgacgtaactggg

SEQ ID NO: 143 - RNA, 136 nt, synthetic construct
  source 1..136: mol_type = other RNA
gtatctgacccagttacgccagttttagagctagaaatagcaagttaaaataaggctagtccgttatcaacttgaaaaagtggcaccgagtcggtgcttggagtttgctctgtgtatgacgtaactgggttttttt

SEQ ID NO: 144 - RNA, 126 nt, synthetic construct
  source 1..126: mol_type = other RNA
tatctgacccagttacgccagttttagagctagaaatagcaagttaaaataaggctagtccgttatcaacttgaaaaagtggcaccgagtcggtgctttacactagatggtgctgtcgtaactggg

SEQ ID NO: 145 - RNA, 134 nt, synthetic construct
  source 1..134: mol_type = other RNA
gtatctgacccagttacgccagttttagagctagaaatagcaagttaaaataaggctagtccgttatcaacttgaaaaagtggcaccgagtcggtgctttacactagatggtgctgtcgtaactgggttttttt

SEQ ID NO: 146 - RNA, 126 nt, synthetic construct
  source 1..126: mol_type = other RNA
tatctgacccagttacgccagttttagagctagaaatagcaagttaaaataaggctagtccgttatcaacttgaaaaagtggcaccgagtcggtgcacttcacatccagtgacgagcgtaactggg

SEQ ID NO: 147 - RNA, 134 nt, synthetic construct
  source 1..134: mol_type = other RNA
gtatctgacccagttacgccagttttagagctagaaatagcaagttaaaataaggctagtccgttatcaacttgaaaaagtggcaccgagtcggtgcacttcacatccagtgacgagcgtaactgggttttttt

SEQ ID NO: 148 - RNA, 128 nt, synthetic construct
  source 1..128: mol_type = other RNA
tatctgacccagttacgccagttttagagctagaaatagcaagttaaaataaggctagtccgttatcaacttgaaaaagtggcaccgagtcggtgcgcggtatcacctacgacatcaacgtaactggg

SEQ ID NO: 149 - RNA, 136 nt, synthetic construct
  source 1..136: mol_type = other RNA
gtatctgacccagttacgccagttttagagctagaaatagcaagttaaaataaggctagtccgttatcaacttgaaaaagtggcaccgagtcggtgcgcggtatcacctacgacatcaacgtaactgggttttttt

SEQ ID NO: 150 - RNA, 126 nt, synthetic construct
  source 1..126: mol_type = other RNA
tatctgacccagttacgccagttttagagctagaaatagcaagttaaaataaggctagtccgttatcaacttgaaaaagtggcaccgagtcggtgcctgcccctgagggacgatcccgtaactggg

SEQ ID NO: 151 - RNA, 134 nt, synthetic construct
  source 1..134: mol_type = other RNA
gtatctgacccagttacgccagttttagagctagaaatagcaagttaaaataaggctagtccgttatcaacttgaaaaagtggcaccgagtcggtgcctgcccctgagggacgatcccgtaactgggttttttt

SEQ ID NO: 152 - RNA, 129 nt, synthetic construct
  source 1..129: mol_type = other RNA
tatctgacccagttacgccagttttagagctagaaatagcaagttaaaataaggctagtccgttatcaacttgaaaaagtggcaccgagtcggtgcgggtctgatgcccgagaccacgacgtaactggg

SEQ ID NO: 153 - RNA, 137 nt, synthetic construct
  source 1..137: mol_type = other RNA
gtatctgacccagttacgccagttttagagctagaaatagcaagttaaaataaggctagtccgttatcaacttgaaaaagtggcaccgagtcggtgcgggtctgatgcccgagaccacgacgtaactgggttttttt

SEQ ID NO: 154 - RNA, 126 nt, synthetic construct
  source 1..126: mol_type = other RNA
tatctgacccagttacgccagttttagagctagaaatagcaagttaaaataaggctagtccgttatcaacttgaaaaagtggcaccgagtcggtgcgccccacgggccgagtgcggcgtaactggg

SEQ ID NO: 155 - RNA, 134 nt, synthetic construct
  source 1..134: mol_type = other RNA
gtatctgacccagttacgccagttttagagctagaaatagcaagttaaaataaggctagtccgttatcaacttgaaaaagtggcaccgagtcggtgcgccccacgggccgagtgcggcgtaactgggttttttt

SEQ ID NO: 156 - RNA, 136 nt, synthetic construct
  source 1..136: mol_type = other RNA
tatctgacccagttacgccagttttagagctagaaatagcaagttaaaataaggctagtccgttatcaacttgaaaaagtggcaccgagtcggtgctaactgctctatatacgagattatcaaatccgtaactggg

SEQ ID NO: 157 - RNA, 144 nt, synthetic construct
  source 1..144: mol_type = other RNA
gtatctgacccagttacgccagttttagagctagaaatagcaagttaaaataaggctagtccgttatcaacttgaaaaagtggcaccgagtcggtgctaactgctctatatacgagattatcaaatccgtaactgggttttttt

SEQ ID NO: 158 - RNA, 136 nt, synthetic construct
  source 1..136: mol_type = other RNA
tatctgacccagttacgccagttttagagctagaaatagcaagttaaaataaggctagtccgttatcaacttgaaaaagtggcaccgagtcggtgcggtaacgtaatacaaggaaacatgagacaccgtaactggg

SEQ ID NO: 159 - RNA, 144 nt, synthetic construct
  source 1..144: mol_type = other RNA
gtatctgacccagttacgccagttttagagctagaaatagcaagttaaaataaggctagtccgttatcaacttgaaaaagtggcaccgagtcggtgcggtaacgtaatacaaggaaacatgagacaccgtaactgggttttttt

SEQ ID NO: 160 - RNA, 136 nt, synthetic construct
  source 1..136: mol_type = other RNA
tatctgacccagttacgccagttttagagctagaaatagcaagttaaaataaggctagtccgttatcaacttgaaaaagtggcaccgagtcggtgccaagttgtgcccctagtgagcttggattaccgtaactggg

SEQ ID NO: 161 - RNA, 144 nt, synthetic construct
  source 1..144: mol_type = other RNA
gtatctgacccagttacgccagttttagagctagaaatagcaagttaaaataaggctagtccgttatcaacttgaaaaagtggcaccgagtcggtgccaagttgtgcccctagtgagcttggattaccgtaactgggttttttt

SEQ ID NO: 162 - RNA, 136 nt, synthetic construct
  source 1..136: mol_type = other RNA
tatctgacccagttacgccagttttagagctagaaatagcaagttaaaataaggctagtccgttatcaacttgaaaaagtggcaccgagtcggtgcgcgcgaacctgggatcgccatgcatgatagcgtaactggg

SEQ ID NO: 163 - RNA, 144 nt, synthetic construct
  source 1..144: mol_type = other RNA
gtatctgacccagttacgccagttttagagctagaaatagcaagttaaaataaggctagtccgttatcaacttgaaaaagtggcaccgagtcggtgcgcgcgaacctgggatcgccatgcatgatagcgtaactgggttttttt

SEQ ID NO: 164 - RNA, 144 nt, synthetic construct
  source 1..144: mol_type = other RNA
tatctgacccagttacgccagttttagagctagaaatagcaagttaaaataaggctagtccgttatcaacttgaaaaagtggcaccgagtcggtgcatgatcctgacgacggagaccgccgtcgtcgacaagcccgtaactggg

SEQ ID NO: 165 - RNA, 152 nt, synthetic construct
  source 1..152: mol_type = other RNA
gtatctgacccagttacgccagttttagagctagaaatagcaagttaaaataaggctagtccgttatcaacttgaaaaagtggcaccgagtcggtgcatgatcctgacgacggagaccgccgtcgtcgacaagcccgtaactgggttttttt

SEQ ID NO: 166 - RNA, 127 nt, synthetic construct
  source 1..127: mol_type = other RNA
tatctgacccagttacgccagttttagagctagaaatagcaagttaaaataaggctagtccgttatcaacttgaaaaagtggcaccgagtcggtgcaaaactctgctgatggccagcgtaactgggt

SEQ ID NO: 167 - RNA, 135 nt, synthetic construct
  source 1..135: mol_type = other RNA
gtatctgacccagttacgccagttttagagctagaaatagcaagttaaaataaggctagtccgttatcaacttgaaaaagtggcaccgagtcggtgcaaaactctgctgatggccagcgtaactgggtttttttt

SEQ ID NO: 168 - RNA, 129 nt, synthetic construct
  source 1..129: mol_type = other RNA
tatctgacccagttacgccagttttagagctagaaatagcaagttaaaataaggctagtccgttatcaacttgaaaaagtggcaccgagtcggtgcaaaactctgctgatggccagcgtaactgggtca

SEQ ID NO: 169 - RNA, 137 nt, synthetic construct
  source 1..137: mol_type = other RNA
gtatctgacccagttacgccagttttagagctagaaatagcaagttaaaataaggctagtccgttatcaacttgaaaaagtggcaccgagtcggtgcaaaactctgctgatggccagcgtaactgggtcattttttt

SEQ ID NO: 170 - RNA, 132 nt, synthetic construct
  source 1..132: mol_type = other RNA
tatctgacccagttacgccagttttagagctagaaatagcaagttaaaataaggctagtccgttatcaacttgaaaaagtggcaccgagtcggtgcaattaaaaactctgctgatggccagcgtaactgggt

SEQ ID NO: 171 - RNA, 140 nt, synthetic construct
  source 1..140: mol_type = other RNA
gtatctgacccagttacgccagttttagagctagaaatagcaagttaaaataaggctagtccgttatcaacttgaaaaagtggcaccgagtcggtgcaattaaaaactctgctgatggccagcgtaactgggtttttttt

SEQ ID NO: 172 - RNA, 134 nt, synthetic construct
  source 1..134: mol_type = other RNA
tatctgacccagttacgccagttttagagctagaaatagcaagttaaaataaggctagtccgttatcaacttgaaaaagtggcaccgagtcggtgcaattaaaaactctgctgatggccagcgtaactgggtca

SEQ ID NO: 173 - RNA, 142 nt, synthetic construct
  source 1..142: mol_type = other RNA
gtatctgacccagttacgccagttttagagctagaaatagcaagttaaaataaggctagtccgttatcaacttgaaaaagtggcaccgagtcggtgcaattaaaaactctgctgatggccagcgtaactgggtcattttttt

SEQ ID NO: 174 - RNA, 137 nt, synthetic construct
  source 1..137: mol_type = other RNA
tatctgacccagttacgccagttttagagctagaaatagcaagttaaaataaggctagtccgttatcaacttgaaaaagtggcaccgagtcggtgctcctaaattaaaaactctgctgatggccagcgtaactgggt

SEQ ID NO: 175 - RNA, 145 nt, synthetic construct
  source 1..145: mol_type = other RNA
gtatctgacccagttacgccagttttagagctagaaatagcaagttaaaataaggctagtccgttatcaacttgaaaaagtggcaccgagtcggtgctcctaaattaaaaactctgctgatggccagcgtaactgggtttttttt

SEQ ID NO: 176 - RNA, 139 nt, synthetic construct
  source 1..139: mol_type = other RNA
tatctgacccagttacgccagttttagagctagaaatagcaagttaaaataaggctagtccgttatcaacttgaaaaagtggcaccgagtcggtgctcctaaattaaaaactctgctgatggccagcgtaactgggtca

SEQ ID NO: 177 - RNA, 147 nt, synthetic construct
  source 1..147: mol_type = other RNA
gtatctgacccagttacgccagttttagagctagaaatagcaagttaaaataaggctagtccgttatcaacttgaaaaagtggcaccgagtcggtgctcctaaattaaaaactctgctgatggccagcgtaactgggtcattttttt

SEQ ID NO: 178 - RNA, 127 nt, synthetic construct
  source 1..127: mol_type = other RNA
tatctgacccagttacgccagttttagagctagaaatagcaagttaaaataaggctagtccgttatcaacttgaaaaagtggcaccgagtcggtgcggggtgaagacaagggcctccgtaactgggt

SEQ ID NO: 179 - RNA, 135 nt, synthetic construct
  source 1..135: mol_type = other RNA
gtatctgacccagttacgccagttttagagctagaaatagcaagttaaaataaggctagtccgttatcaacttgaaaaagtggcaccgagtcggtgcggggtgaagacaagggcctccgtaactgggtttttttt

SEQ ID NO: 180 - RNA, 129 nt, synthetic construct
  source 1..129: mol_type = other RNA
tatctgacccagttacgccagttttagagctagaaatagcaagttaaaataaggctagtccgttatcaacttgaaaaagtggcaccgagtcggtgcggggtgaagacaagggcctccgtaactgggtca

SEQ ID NO: 181 - RNA, 137 nt, synthetic construct
  source 1..137: mol_type = other RNA
gtatctgacccagttacgccagttttagagctagaaatagcaagttaaaataaggctagtccgttatcaacttgaaaaagtggcaccgagtcggtgcggggtgaagacaagggcctccgtaactgggtcattttttt

SEQ ID NO: 182 - RNA, 132 nt, synthetic construct
  source 1..132: mol_type = other RNA
tatctgacccagttacgccagttttagagctagaaatagcaagttaaaataaggctagtccgttatcaacttgaaaaagtggcaccgagtcggtgcgtgatggggtgaagacaagggcctccgtaactgggt

SEQ ID NO: 183 - RNA, 140 nt, synthetic construct
  source 1..140: mol_type = other RNA
gtatctgacccagttacgccagttttagagctagaaatagcaagttaaaataaggctagtccgttatcaacttgaaaaagtggcaccgagtcggtgcgtgatggggtgaagacaagggcctccgtaactgggtttttttt

SEQ ID NO: 184 - RNA, 134 nt, synthetic construct
  source 1..134: mol_type = other RNA
tatctgacccagttacgccagttttagagctagaaatagcaagttaaaataaggctagtccgttatcaacttgaaaaagtggcaccgagtcggtgcgtgatggggtgaagacaagggcctccgtaactgggtca

SEQ ID NO: 185 - RNA, 142 nt, synthetic construct
  source 1..142: mol_type = other RNA
gtatctgacccagttacgccagttttagagctagaaatagcaagttaaaataaggctagtccgttatcaacttgaaaaagtggcaccgagtcggtgcgtgatggggtgaagacaagggcctccgtaactgggtcattttttt

SEQ ID NO: 186 - RNA, 137 nt, synthetic construct
  source 1..137: mol_type = other RNA
tatctgacccagttacgccagttttagagctagaaatagcaagttaaaataaggctagtccgttatcaacttgaaaaagtggcaccgagtcggtgcgggcagtgatggggtgaagacaagggcctccgtaactgggt

SEQ ID NO: 187 - RNA, 145 nt, synthetic construct
  source 1..145: mol_type = other RNA
gtatctgacccagttacgccagttttagagctagaaatagcaagttaaaataaggctagtccgttatcaacttgaaaaagtggcaccgagtcggtgcgggcagtgatggggtgaagacaagggcctccgtaactgggtttttttt

SEQ ID NO: 188 - RNA, 139 nt, synthetic construct
  source 1..139: mol_type = other RNA
tatctgacccagttacgccagttttagagctagaaatagcaagttaaaataaggctagtccgttatcaacttgaaaaagtggcaccgagtcggtgcgggcagtgatggggtgaagacaagggcctccgtaactgggtca

SEQ ID NO: 189 - RNA, 147 nt, synthetic construct
  source 1..147: mol_type = other RNA
gtatctgacccagttacgccagttttagagctagaaatagcaagttaaaataaggctagtccgttatcaacttgaaaaagtggcaccgagtcggtgcgggcagtgatggggtgaagacaagggcctccgtaactgggtcattttttt

SEQ ID NO: 190 - RNA, 127 nt, synthetic construct
  source 1..127: mol_type = other RNA
tatctgacccagttacgccagttttagagctagaaatagcaagttaaaataaggctagtccgttatcaacttgaaaaagtggcaccgagtcggtgcctggccccagagtctgtgcacgtaactgggt

SEQ ID NO: 191 - RNA, 135 nt, synthetic construct
  source 1..135: mol_type = other RNA
gtatctgacccagttacgccagttttagagctagaaatagcaagttaaaataaggctagtccgttatcaacttgaaaaagtggcaccgagtcggtgcctggccccagagtctgtgcacgtaactgggtttttttt

SEQ ID NO: 192 - RNA, 129 nt, synthetic construct
  source 1..129: mol_type = other RNA
tatctgacccagttacgccagttttagagctagaaatagcaagttaaaataaggctagtccgttatcaacttgaaaaagtggcaccgagtcggtgcctggccccagagtctgtgcacgtaactgggtca

SEQ ID NO: 193 - RNA, 137 nt, synthetic construct
  source 1..137: mol_type = other RNA
gtatctgacccagttacgccagttttagagctagaaatagcaagttaaaataaggctagtccgttatcaacttgaaaaagtggcaccgagtcggtgcctggccccagagtctgtgcacgtaactgggtcattttttt

SEQ ID NO: 194 - RNA, 132 nt, synthetic construct
  source 1..132: mol_type = other RNA
tatctgacccagttacgccagttttagagctagaaatagcaagttaaaataaggctagtccgttatcaacttgaaaaagtggcaccgagtcggtgcgctgtctggccccagagtctgtgcacgtaactgggt

SEQ ID NO: 195 - RNA, 140 nt, synthetic construct
  source 1..140: mol_type = other RNA
gtatctgacccagttacgccagttttagagctagaaatagcaagttaaaataaggctagtccgttatcaacttgaaaaagtggcaccgagtcggtgcgctgtctggccccagagtctgtgcacgtaactgggtttttttt

SEQ ID NO: 196 - RNA, 134 nt, synthetic construct
  source 1..134: mol_type = other RNA
tatctgacccagttacgccagttttagagctagaaatagcaagttaaaataaggctagtccgttatcaacttgaaaaagtggcaccgagtcggtgcgctgtctggccccagagtctgtgcacgtaactgggtca

SEQ ID NO: 197 - RNA, 142 nt, synthetic construct
  source 1..142: mol_type = other RNA
gtatctgacccagttacgccagttttagagctagaaatagcaagttaaaataaggctagtccgttatcaacttgaaaaagtggcaccgagtcggtgcgctgtctggccccagagtctgtgcacgtaactgggtcattttttt

SEQ ID NO: 198 - RNA, 137 nt, synthetic construct
  source 1..137: mol_type = other RNA
tatctgacccagttacgccagttttagagctagaaatagcaagttaaaataaggctagtccgttatcaacttgaaaaagtggcaccgagtcggtgccccaagctgtctggccccagagtctgtgcacgtaactgggt

SEQ ID NO: 199 - RNA, 145 nt, synthetic construct
  source 1..145: mol_type = other RNA
gtatctgacccagttacgccagttttagagctagaaatagcaagttaaaataaggctagtccgttatcaacttgaaaaagtggcaccgagtcggtgccccaagctgtctggccccagagtctgtgcacgtaactgggtttttttt

SEQ ID NO: 200 - RNA, 139 nt, synthetic construct
  source 1..139: mol_type = other RNA
tatctgacccagttacgccagttttagagctagaaatagcaagttaaaataaggctagtccgttatcaacttgaaaaagtggcaccgagtcggtgccccaagctgtctggccccagagtctgtgcacgtaactgggtca

SEQ ID NO: 201 - RNA, 147 nt, synthetic construct
  source 1..147: mol_type = other RNA
gtatctgacccagttacgccagttttagagctagaaatagcaagttaaaataaggctagtccgttatcaacttgaaaaagtggcaccgagtcggtgccccaagctgtctggccccagagtctgtgcacgtaactgggtcattttttt

SEQ ID NO: 202 - RNA, 142 nt, synthetic construct
  source 1..142: mol_type = other RNA
tatctgacccagttacgccagttttagagctagaaatagcaagttaaaataaggctagtccgttatcaacttgaaaaagtggcaccgagtcggtgcggcttgtcgacgacggcggtctccgtcgtcaggatcatcgtaactg

SEQ ID NO: 203 - RNA, 150 nt, synthetic construct
  source 1..150: mol_type = other RNA
gtatctgacccagttacgccagttttagagctagaaatagcaagttaaaataaggctagtccgttatcaacttgaaaaagtggcaccgagtcggtgcggcttgtcgacgacggcggtctccgtcgtcaggatcatcgtaactgttttttt

SEQ ID NO: 204 - RNA, 143 nt, synthetic construct
  source 1..143: mol_type = other RNA
tatctgacccagttacgccagttttagagctagaaatagcaagttaaaataaggctagtccgttatcaacttgaaaaagtggcaccgagtcggtgcggcttgtcgacgacggcggtctccgtcgtcaggatcatcgtaactgg

SEQ ID NO: 205 - RNA, 151 nt, synthetic construct
  source 1..151: mol_type = other RNA
gtatctgacccagttacgccagttttagagctagaaatagcaagttaaaataaggctagtccgttatcaacttgaaaaagtggcaccgagtcggtgcggcttgtcgacgacggcggtctccgtcgtcaggatcatcgtaactggttttttt

SEQ ID NO: 206 - RNA, 145 nt, synthetic construct
  source 1..145: mol_type = other RNA
tatctgacccagttacgccagttttagagctagaaatagcaagttaaaataaggctagtccgttatcaacttgaaaaagtggcaccgagtcggtgcggcttgtcgacgacggcggtctccgtcgtcaggatcatcgtaactgggt

SEQ ID NO: 207 - RNA, 153 nt, synthetic construct
  source 1..153: mol_type = other RNA
gtatctgacccagttacgccagttttagagctagaaatagcaagttaaaataaggctagtccgttatcaacttgaaaaagtggcaccgagtcggtgcggcttgtcgacgacggcggtctccgtcgtcaggatcatcgtaactgggtttttttt

SEQ ID NO: 208 - RNA, 147 nt, synthetic construct
  source 1..147: mol_type = other RNA
tatctgacccagttacgccagttttagagctagaaatagcaagttaaaataaggctagtccgttatcaacttgaaaaagtggcaccgagtcggtgcggcttgtcgacgacggcggtctccgtcgtcaggatcatcgtaactgggtca

SEQ ID NO: 209 - RNA, 155 nt, synthetic construct
  source 1..155: mol_type = other RNA
gtatctgacccagttacgccagttttagagctagaaatagcaagttaaaataaggctagtccgttatcaacttgaaaaagtggcaccgagtcggtgcggcttgtcgacgacggcggtctccgtcgtcaggatcatcgtaactgggtcattttttt

SEQ ID NO: 210 - RNA, 148 nt, synthetic construct
  source 1..148: mol_type = other RNA
tatctgacccagttacgccagttttagagctagaaatagcaagttaaaataaggctagtccgttatcaacttgaaaaagtggcaccgagtcggtgcggcttgtcgacgacggcggtctccgtcgtcaggatcatcgtaactgggtcag

SEQ ID NO: 211 - RNA, 156 nt, synthetic construct
  source 1..156: mol_type = other RNA
gtatctgacccagttacgccagttttagagctagaaatagcaagttaaaataaggctagtccgttatcaacttgaaaaagtggcaccgagtcggtgcggcttgtcgacgacggcggtctccgtcgtcaggatcatcgtaactgggtcagttttttt

SEQ ID NO: 212 - RNA, 149 nt, synthetic construct
  source 1..149: mol_type = other RNA
tatctgacccagttacgccagttttagagctagaaatagcaagttaaaataaggctagtccgttatcaacttgaaaaagtggcaccgagtcggtgcggcttgtcgacgacggcggtctccgtcgtcaggatcatcgtaactgggtcaga

SEQ ID NO: 213 - RNA, 157 nt, synthetic construct
  source 1..157: mol_type = other RNA
gtatctgacccagttacgccagttttagagctagaaatagcaagttaaaataaggctagtccgttatcaacttgaaaaagtggcaccgagtcggtgcggcttgtcgacgacggcggtctccgtcgtcaggatcatcgtaactgggtcagattttttt

SEQ ID NO: 214 - RNA, 150 nt, synthetic construct
  source 1..150: mol_type = other RNA
tatctgacccagttacgccagttttagagctagaaatagcaagttaaaataaggctagtccgttatcaacttgaaaaagtggcaccgagtcggtgcggcttgtcgacgacggcggtctccgtcgtcaggatcatcgtaactgggtcagat

SEQ ID NO: 215 - RNA, 158 nt, synthetic construct
  source 1..158: mol_type = other RNA
gtatctgacccagttacgccagttttagagctagaaatagcaagttaaaataaggctagtccgttatcaacttgaaaaagtggcaccgagtcggtgcggcttgtcgacgacggcggtctccgtcgtcaggatcatcgtaactgggtcagatttttttt

SEQ ID NO: 216 - RNA, 151 nt, synthetic construct
  source 1..151: mol_type = other RNA
tatctgacccagttacgccagttttagagctagaaatagcaagttaaaataaggctagtccgttatcaacttgaaaaagtggcaccgagtcggtgcggcttgtcgacgacggcggtctccgtcgtcaggatcatcgtaactgggtcagata

SEQ ID NO: 217 - RNA, 159 nt, synthetic construct
  source 1..159: mol_type = other RNA
gtatctgacccagttacgccagttttagagctagaaatagcaagttaaaataaggctagtccgttatcaacttgaaaaagtggcaccgagtcggtgcggcttgtcgacgacggcggtctccgtcgtcaggatcatcgtaactgggtcagatattttttt

SEQ ID NO: 218 - RNA, 148 nt, synthetic construct
  source 1..148: mol_type = other RNA
tatctgacccagttacgccagtttaagagcggggaaatccgcaagtttaaataaggctagtccgttatcagcgtgaaaacgcggcaccgagtcggtgcggcttgtcgacgacggcggtctccgtcgtcaggatcatcgtaactgggtc

SEQ ID NO: 219 - RNA, 156 nt, synthetic construct
  source 1..156: mol_type = other RNA
gtatctgacccagttacgccagtttaagagcggggaaatccgcaagtttaaataaggctagtccgttatcagcgtgaaaacgcggcaccgagtcggtgcggcttgtcgacgacggcggtctccgtcgtcaggatcatcgtaactgggtcttttttt

SEQ ID NO: 220 - RNA, 189 nt, synthetic construct
  source 1..189: mol_type = other RNA
tatctgacccagttacgccagttttagagctagaaatagcaagttaaaataaggctagtccgttatcaacttgaaaaagtggcaccgagtcggtgcggcttgtcgacgacggcggtctccgtcgtcaggatcatcgtaactgggtctctgtccgcggttctatctagttacgcgttaaaccaactagaa

SEQ ID NO: 221 - RNA, 197 nt, synthetic construct
  source 1..197: mol_type = other RNA
gtatctgacccagttacgccagttttagagctagaaatagcaagttaaaataaggctagtccgttatcaacttgaaaaagtggcaccgagtcggtgcggcttgtcgacgacggcggtctccgtcgtcaggatcatcgtaactgggtctctgtccgcggttctatctagttacgcgttaaaccaactagaattttttt

SEQ ID NO: 222 - RNA, 189 nt, synthetic construct
  source 1..189: mol_type = other RNA
tatctgacccagttacgccagttttagagctagaaatagcaagttaaaataaggctagtccgttatcaacttgaaaaagtggcaccgagtcggtgcggcttgtcgacgacggcggtctccgtcgtcaggatcatcgtaactgggtccccccccgcggttctatctagttacgcgttaaaccaactagaa

SEQ ID NO: 223 - RNA, 197 nt, synthetic construct
  source 1..197: mol_type = other RNA
gtatctgacccagttacgccagttttagagctagaaatagcaagttaaaataaggctagtccgttatcaacttgaaaaagtggcaccgagtcggtgcggcttgtcgacgacggcggtctccgtcgtcaggatcatcgtaactgggtccccccccgcggttctatctagttacgcgttaaaccaactagaattttttt

SEQ ID NO: 224 - RNA, 191 nt, synthetic construct
  source 1..191: mol_type = other RNA
tatctgacccagttacgccagtttaagagcggggaaatccgcaagtttaaataaggctagtccgttatcagcgtgaaaacgcggcaccgagtcggtgcggcttgtcgacgacggcggtctccgtcgtcaggatcatcgtaactgggtctctgtccgcggttctatctagttacgcgttaaaccaactagaa

SEQ ID NO: 225 - RNA, 199 nt, synthetic construct
  source 1..199: mol_type = other RNA
gtatctgacccagttacgccagtttaagagcggggaaatccgcaagtttaaataaggctagtccgttatcagcgtgaaaacgcggcaccgagtcggtgcggcttgtcgacgacggcggtctccgtcgtcaggatcatcgtaactgggtctctgtccgcggttctatctagttacgcgttaaaccaactagaattttttt

SEQ ID NO: 226 - RNA, 191 nt, synthetic construct
  source 1..191: mol_type = other RNA
tatctgacccagttacgccagtttaagagcggggaaatccgcaagtttaaataaggctagtccgttatcagcgtgaaaacgcggcaccgagtcggtgcggcttgtcgacgacggcggtctccgtcgtcaggatcatcgtaactgggtctccctccgcggttctatctagttacgcgttaaaccaactagaa

SEQ ID NO: 227 - RNA, 199 nt, synthetic construct
  source 1..199: mol_type = other RNA
gtatctgacccagttacgccagtttaagagcggggaaatccgcaagtttaaataaggctagtccgttatcagcgtgaaaacgcggcaccgagtcggtgcggcttgtcgacgacggcggtctccgtcgtcaggatcatcgtaactgggtctccctccgcggttctatctagttacgcgttaaaccaactagaattttttt

SEQ ID NO: 228 - RNA, 148 nt, synthetic construct
  source 1..148: mol_type = other RNA
tatctgacccagttacgccagtttaagagcggggaaatccgcaagtttaaataaggctagtccgttatcagcgggaaaccgcggcaccgagtcggtgtggcttgtcgacgacggcggtctccgtcgtcaggatcatcgtaactgggtc

SEQ ID NO: 229 - RNA, 156 nt, synthetic construct
  source 1..156: mol_type = other RNA
gtatctgacccagttacgccagtttaagagcggggaaatccgcaagtttaaataaggctagtccgttatcagcgggaaaccgcggcaccgagtcggtgtggcttgtcgacgacggcggtctccgtcgtcaggatcatcgtaactgggtcttttttt

SEQ ID NO: 230 - RNA, 148 nt, synthetic construct
  source 1..148: mol_type = other RNA
tatctgacccagttacgccagtttaaaagcggggaaatccgcaagtttaaataaggctagtccgttatcagcgggaaaccgcggcaccaagttggtgtggcttgtcgacgacggcggtctccgtcgtcaggatcatcgtaactgggtc

SEQ ID NO: 231 - RNA, 156 nt, synthetic construct
  source 1..156: mol_type = other RNA
gtatctgacccagttacgccagtttaaaagcggggaaatccgcaagtttaaataaggctagtccgttatcagcgggaaaccgcggcaccaagttggtgtggcttgtcgacgacggcggtctccgtcgtcaggatcatcgtaactgggtcttttttt

SEQ ID NO: 232 - RNA, 148 nt, synthetic construct
  source 1..148: mol_type = other RNA
tatctgacccagttacgccagttttagagctagaaatagcaagttaaaataaggctagtccgttatcaacttgaaaaagtggcaccgagtcggtgcggcttgtcgacgacggcggtctccgtcgtcaggatcatcgtaactgggtttt

SEQ ID NO: 233 - RNA, 150 nt, synthetic construct
  source 1..150: mol_type = other RNA
tatctgacccagttacgccagttttagagctagaaatagcaagttaaaataaggctagtccgttatcaacttgaaaaagtggcaccgagtcggtgcggcttgtcgacgacggcggtctccgtcgtcaggatcatcgtaactgggtctttt

SEQ ID NO: 234 - RNA, 20 nt, synthetic construct
  source 1..20: mol_type = other RNA
gtggtagagggtgtttcacg

SEQ ID NO: 235 - RNA, 17 nt, synthetic construct
  source 1..17: mol_type = other RNA
gtagagggtgtttcacg

SEQ ID NO: 236 - RNA, 18 nt, synthetic construct
  source 1..18: mol_type = other RNA
ggtagagggtgtttcacg

SEQ ID NO: 237 - RNA, 19 nt, synthetic construct
  source 1..19: mol_type = other RNA
tggtagagggtgtttcacg

SEQ ID NO: 238 - RNA, 21 nt, synthetic construct
  source 1..21: mol_type = other RNA
agtggtagagggtgtttcacg

SEQ ID NO: 239 - RNA, 22 nt, synthetic construct
  source 1..22: mol_type = other RNA
aagtggtagagggtgtttcacg

SEQ ID NO: 240-244 - skipped (5 entries)

SEQ ID NO: 245 - RNA, 10 nt, synthetic construct
  source 1..10: mol_type = other RNA
gaaacaccct

SEQ ID NO: 246 - RNA, 11 nt, synthetic construct
  source 1..11: mol_type = other RNA
gaaacaccctc

SEQ ID NO: 247 - RNA, 12 nt, synthetic construct
  source 1..12: mol_type = other RNA
gaaacaccctct

SEQ ID NO: 248 - RNA, 13 nt, synthetic construct
  source 1..13: mol_type = other RNA
gaaacaccctcta

SEQ ID NO: 249 - RNA, 14 nt, synthetic construct
  source 1..14: mol_type = other RNA
gaaacaccctctac

SEQ ID NO: 250 - RNA, 15 nt, synthetic construct
  source 1..15: mol_type = other RNA
gaaacaccctctacc

SEQ ID NO: 251 - RNA, 16 nt, synthetic construct
  source 1..16: mol_type = other RNA
gaaacaccctctacca

SEQ ID NO: 252 - RNA, 17 nt, synthetic construct
  source 1..17: mol_type = other RNA
gaaacaccctctaccac

SEQ ID NO: 253 - RNA, 18 nt, synthetic construct
  source 1..18: mol_type = other RNA
gaaacaccctctaccact

SEQ ID NO: 254 - RNA, 19 nt, synthetic construct
  source 1..19: mol_type = other RNA
gaaacaccctctaccactt

SEQ ID NO: 255 - RNA, 144 nt, synthetic construct
  source 1..144: mol_type = other RNA
gtggtagagggtgtttcacggttttagagctagaaatagcaagttaaaataaggctagtccgttatcaacttgaaaaagtggcaccgagtcggtgcggcttgtcgacgacggcggtctccgtcgtcaggatcatgaaacaccct

SEQ ID NO: 256 - RNA, 151 nt, synthetic construct
  source 1..151: mol_type = other RNA
gtggtagagggtgtttcacggttttagagctagaaatagcaagttaaaataaggctagtccgttatcaacttgaaaaagtggcaccgagtcggtgcggcttgtcgacgacggcggtctccgtcgtcaggatcatgaaacaccctttttttt

SEQ ID NO: 257 - RNA, 146 nt, synthetic construct
  source 1..146: mol_type = other RNA
gtggtagagggtgtttcacggttttagagctagaaatagcaagttaaaataaggctagtccgttatcaacttgaaaaagtggcaccgagtcggtgcggcttgtcgacgacggcggtctccgtcgtcaggatcatgaaacaccctct

SEQ ID NO: 258 - RNA, 153 nt, synthetic construct
  source 1..153: mol_type = other RNA
gtggtagagggtgtttcacggttttagagctagaaatagcaagttaaaataaggctagtccgttatcaacttgaaaaagtggcaccgagtcggtgcggcttgtcgacgacggcggtctccgtcgtcaggatcatgaaacaccctctttttttt

SEQ ID NO: 259 - RNA, 124 nt, synthetic construct
  source 1..124: mol_type = other RNA
gtggtagagggtgtttcacggttttagagctagaaatagcaagttaaaataaggctagtccgttatcaacttgaaaaagtggcaccgagtcggtgctaagtcaaatgagactttgaaacaccct

SEQ ID NO: 260 - RNA, 132 nt, synthetic construct
  source 1..132: mol_type = other RNA
gtggtagagggtgtttcacggttttagagctagaaatagcaagttaaaataaggctagtccgttatcaacttgaaaaagtggcaccgagtcggtgctaagtcaaatgagactttgaaacaccctattttttt

SEQ ID NO: 261 - RNA, 124 nt, synthetic construct
  source 1..124: mol_type = other RNA
gtggtagagggtgtttcacggttttagagctagaaatagcaagttaaaataaggctagtccgttatcaacttgaaaaagtggcaccgagtcggtgcaatttcaagatcctgcctgaaacaccct

SEQ ID NO: 262 - RNA, 132 nt, synthetic construct
  source 1..132: mol_type = other RNA
gtggtagagggtgtttcacggttttagagctagaaatagcaagttaaaataaggctagtccgttatcaacttgaaaaagtggcaccgagtcggtgcaatttcaagatcctgcctgaaacaccctattttttt

SEQ ID NO: 263 - RNA, 124 nt, synthetic construct
  source 1..124: mol_type = other RNA
gtggtagagggtgtttcacggttttagagctagaaatagcaagttaaaataaggctagtccgttatcaacttgaaaaagtggcaccgagtcggtgcttgctctctgccatgtacgaaacaccct

SEQ ID NO: 264 - RNA, 132 nt, synthetic construct
  source 1..132: mol_type = other RNA
gtggtagagggtgtttcacggttttagagctagaaatagcaagttaaaataaggctagtccgttatcaacttgaaaaagtggcaccgagtcggtgcttgctctctgccatgtacgaaacaccctattttttt

SEQ ID NO: 265 - RNA, 121 nt, synthetic construct
  source 1..121: mol_type = other RNA
gtggtagagggtgtttcacggttttagagctagaaatagcaagttaaaataaggctagtccgttatcaacttgaaaaagtggcaccgagtcggtgcacctttggccgttctgaaacaccct

SEQ ID NO: 266 - RNA, 129 nt, synthetic construct
  source 1..129: mol_type = other RNA
gtggtagagggtgtttcacggttttagagctagaaatagcaagttaaaataaggctagtccgttatcaacttgaaaaagtggcaccgagtcggtgcacctttggccgttctgaaacaccctattttttt

SEQ ID NO: 267 - RNA, 124 nt, synthetic construct
  source 1..124: mol_type = other RNA
gtggtagagggtgtttcacggttttagagctagaaatagcaagttaaaataaggctagtccgttatcaacttgaaaaagtggcaccgagtcggtgctctgccctcctcttgggtgaaacaccct

SEQ ID NO: 268 - RNA, 132 nt, synthetic construct
  source 1..132: mol_type = other RNA
gtggtagagggtgtttcacggttttagagctagaaatagcaagttaaaataaggctagtccgttatcaacttgaaaaagtggcaccgagtcggtgctctgccctcctcttgggtgaaacaccctattttttt

SEQ ID NO: 269 - RNA, 121 nt, synthetic construct
  source 1..121: mol_type = other RNA
gtggtagagggtgtttcacggttttagagctagaaatagcaagttaaaataaggctagtccgttatcaacttgaaaaagtggcaccgagtcggtgcatgtacgggccgtccgaaacaccct

SEQ ID NO: 270 - RNA, 129 nt, synthetic construct
  source 1..129: mol_type = other RNA
gtggtagagggtgtttcacggttttagagctagaaatagcaagttaaaataaggctagtccgttatcaacttgaaaaagtggcaccgagtcggtgcatgtacgggccgtccgaaacaccctattttttt

SEQ ID NO: 271 - RNA, 124 nt, synthetic construct
  source 1..124: mol_type = other RNA
gtggtagagggtgtttcacggttttagagctagaaatagcaagttaaaataaggctagtccgttatcaacttgaaaaagtggcaccgagtcggtgcggcctggacgccaggcctgaaacaccct

SEQ ID NO: 272 - RNA, 132 nt, synthetic construct
  source 1..132: mol_type = other RNA
gtggtagagggtgtttcacggttttagagctagaaatagcaagttaaaataaggctagtccgttatcaacttgaaaaagtggcaccgagtcggtgcggcctggacgccaggcctgaaacaccctattttttt

SEQ ID NO: 273 - RNA, 121 nt, synthetic construct
  source 1..121: mol_type = other RNA
gtggtagagggtgtttcacggttttagagctagaaatagcaagttaaaataaggctagtccgttatcaacttgaaaaagtggcaccgagtcggtgctgccgcacggcggctgaaacaccct

SEQ ID NO: 274 - RNA, 129 nt, synthetic construct
  source 1..129: mol_type = other RNA
gtggtagagggtgtttcacggttttagagctagaaatagcaagttaaaataaggctagtccgttatcaacttgaaaaagtggcaccgagtcggtgctgccgcacggcggctgaaacaccctattttttt

SEQ ID NO: 275 - RNA, 128 nt, synthetic construct
  source 1..128: mol_type = other RNA
gtggtagagggtgtttcacggttttagagctagaaatagcaagttaaaataaggctagtccgttatcaacttgaaaaagtggcaccgagtcggtgcttggagtttgctctgtgtatgagaaacaccct

SEQ ID NO: 276 - RNA, 136 nt, synthetic construct
  source 1..136: mol_type = other RNA
gtggtagagggtgtttcacggttttagagctagaaatagcaagttaaaataaggctagtccgttatcaacttgaaaaagtggcaccgagtcggtgcttggagtttgctctgtgtatgagaaacaccctattttttt

SEQ ID NO: 277 - RNA, 126 nt, synthetic construct
  source 1..126: mol_type = other RNA
gtggtagagggtgtttcacggttttagagctagaaatagcaagttaaaataaggctagtccgttatcaacttgaaaaagtggcaccgagtcggtgctttacactagatggtgctgtgaaacaccct

SEQ ID NO: 278 - RNA, 134 nt, synthetic construct
  source 1..134: mol_type = other RNA
gtggtagagggtgtttcacggttttagagctagaaatagcaagttaaaataaggctagtccgttatcaacttgaaaaagtggcaccgagtcggtgctttacactagatggtgctgtgaaacaccctattttttt

SEQ ID NO: 279 - RNA, 126 nt, synthetic construct
  source 1..126: mol_type = other RNA
gtggtagagggtgtttcacggttttagagctagaaatagcaagttaaaataaggctagtccgttatcaacttgaaaaagtggcaccgagtcggtgcacttcacatccagtgacgaggaaacaccct

SEQ ID NO: 280 - RNA, 134 nt, synthetic construct
  source 1..134: mol_type = other RNA
gtggtagagggtgtttcacggttttagagctagaaatagcaagttaaaataaggctagtccgttatcaacttgaaaaagtggcaccgagtcggtgcacttcacatccagtgacgaggaaacaccctattttttt

SEQ ID NO: 281 - RNA, 128 nt, synthetic construct
  source 1..128: mol_type = other RNA
gtggtagagggtgtttcacggttttagagctagaaatagcaagttaaaataaggctagtccgttatcaacttgaaaaagtggcaccgagtcggtgcgcggtatcacctacgacatcaagaaacaccct

SEQ ID NO: 282 - RNA, 136 nt, synthetic construct
  source 1..136: mol_type = other RNA
gtggtagagggtgtttcacggttttagagctagaaatagcaagttaaaataaggctagtccgttatcaacttgaaaaagtggcaccgagtcggtgcgcggtatcacctacgacatcaagaaacaccctattttttt

SEQ ID NO: 283 - RNA, 126 nt, synthetic construct
  source 1..126: mol_type = other RNA
gtggtagagggtgtttcacggttttagagctagaaatagcaagttaaaataaggctagtccgttatcaacttgaaaaagtggcaccgagtcggtgcctgcccctgagggacgatccgaaacaccct

SEQ ID NO: 284 - RNA, 134 nt, synthetic construct
  source 1..134: mol_type = other RNA
gtggtagagggtgtttcacggttttagagctagaaatagcaagttaaaataaggctagtccgttatcaacttgaaaaagtggcaccgagtcggtgcctgcccctgagggacgatccgaaacaccctattttttt

SEQ ID NO: 285 - RNA, 129 nt, synthetic construct
  source 1..129: mol_type = other RNA
gtggtagagggtgtttcacggttttagagctagaaatagcaagttaaaataaggctagtccgttatcaacttgaaaaagtggcaccgagtcggtgcgggtctgatgcccgagaccacgagaaacaccct

SEQ ID NO: 286 - RNA, 137 nt, synthetic construct
  source 1..137: mol_type = other RNA
gtggtagagggtgtttcacggttttagagctagaaatagcaagttaaaataaggctagtccgttatcaacttgaaaaagtggcaccgagtcggtgcgggtctgatgcccgagaccacgagaaacaccctattttttt

SEQ ID NO: 287 - RNA, 126 nt, synthetic construct
  source 1..126: mol_type = other RNA
gtggtagagggtgtttcacggttttagagctagaaatagcaagttaaaataaggctagtccgttatcaacttgaaaaagtggcaccgagtcggtgcgccccacgggccgagtgcgggaaacaccct

SEQ ID NO: 288 - RNA, 134 nt, synthetic construct
  source 1..134: mol_type = other RNA
gtggtagagggtgtttcacggttttagagctagaaatagcaagttaaaataaggctagtccgttatcaacttgaaaaagtggcaccgagtcggtgcgccccacgggccgagtgcgggaaacaccctattttttt

SEQ ID NO: 289 - RNA, 136 nt, synthetic construct
  source 1..136: mol_type = other RNA
gtggtagagggtgtttcacggttttagagctagaaatagcaagttaaaataaggctagtccgttatcaacttgaaaaagtggcaccgagtcggtgctaactgctctatatacgagattatcaaatcgaaacaccct

SEQ ID NO: 290 - RNA, 144 nt, synthetic construct
  source 1..144: mol_type = other RNA
gtggtagagggtgtttcacggttttagagctagaaatagcaagttaaaataaggctagtccgttatcaacttgaaaaagtggcaccgagtcggtgctaactgctctatatacgagattatcaaatcgaaacaccctattttttt

SEQ ID NO: 291 - RNA, 136 nt, synthetic construct
  source 1..136: mol_type = other RNA
gtggtagagggtgtttcacggttttagagctagaaatagcaagttaaaataaggctagtccgttatcaacttgaaaaagtggcaccgagtcggtgcggtaacgtaatacaaggaaacatgagacacgaaacaccct

SEQ ID NO: 292 - RNA, 144 nt, synthetic construct
  source 1..144: mol_type = other RNA
gtggtagagggtgtttcacggttttagagctagaaatagcaagttaaaataaggctagtccgttatcaacttgaaaaagtggcaccgagtcggtgcggtaacgtaatacaaggaaacatgagacacgaaacaccctattttttt

SEQ ID NO: 293 - RNA, 136 nt, synthetic construct
  source 1..136: mol_type = other RNA
gtggtagagggtgtttcacggttttagagctagaaatagcaagttaaaataaggctagtccgttatcaacttgaaaaagtggcaccgagtcggtgccaagttgtgcccctagtgagcttggattacgaaacaccct

SEQ ID NO: 294 - RNA, 144 nt, synthetic construct
  source 1..144: mol_type = other RNA
gtggtagagggtgtttcacggttttagagctagaaatagcaagttaaaataaggctagtccgttatcaacttgaaaaagtggcaccgagtcggtgccaagttgtgcccctagtgagcttggattacgaaacaccctattttttt

SEQ ID NO: 295 - RNA, 136 nt, synthetic construct
  source 1..136: mol_type = other RNA
gtggtagagggtgtttcacggttttagagctagaaatagcaagttaaaataaggctagtccgttatcaacttgaaaaagtggcaccgagtcggtgcgcgcgaacctgggatcgccatgcatgataggaaacaccct

SEQ ID NO: 296 - RNA, 144 nt, synthetic construct
  source 1..144: mol_type = other RNA
gtggtagagggtgtttcacggttttagagctagaaatagcaagttaaaataaggctagtccgttatcaacttgaaaaagtggcaccgagtcggtgcgcgcgaacctgggatcgccatgcatgataggaaacaccctattttttt

SEQ ID NO: 297 - RNA, 144 nt, synthetic construct
  source 1..144: mol_type = other RNA
gtggtagagggtgtttcacggttttagagctagaaatagcaagttaaaataaggctagtccgttatcaacttgaaaaagtggcaccgagtcggtgcatgatcctgacgacggagaccgccgtcgtcgacaagccgaaacaccct

SEQ ID NO: 298 - RNA, 152 nt, synthetic construct
  source 1..152: mol_type = other RNA
gtggtagagggtgtttcacggttttagagctagaaatagcaagttaaaataaggctagtccgttatcaacttgaaaaagtggcaccgagtcggtgcatgatcctgacgacggagaccgccgtcgtcgacaagccgaaacaccctattttttt

SEQ ID NO: 299 - RNA, 142 nt, synthetic construct
  source 1..142: mol_type = other RNA
gtggtagagggtgtttcacggttttagagctagaaatagcaagttaaaataaggctagtccgttatcaacttgaaaaagtggcaccgagtcggtgcggcttgtcgacgacggcggtctccgtcgtcaggatcatgaaacacc

SEQ ID NO: 300 - RNA, 149 nt, synthetic construct
  source 1..149: mol_type = other RNA
gtggtagagggtgtttcacggttttagagctagaaatagcaagttaaaataaggctagtccgttatcaacttgaaaaagtggcaccgagtcggtgcggcttgtcgacgacggcggtctccgtcgtcaggatcatgaaacaccttttttt

SEQ ID NO: 301 - RNA, 143 nt, synthetic construct
  source 1..143: mol_type = other RNA
gtggtagagggtgtttcacggttttagagctagaaatagcaagttaaaataaggctagtccgttatcaacttgaaaaagtggcaccgagtcggtgcggcttgtcgacgacggcggtctccgtcgtcaggatcatgaaacaccc

SEQ ID NO: 302 - RNA, 150 nt, synthetic construct
  source 1..150: mol_type = other RNA
gtggtagagggtgtttcacggttttagagctagaaatagcaagttaaaataaggctagtccgttatcaacttgaaaaagtggcaccgagtcggtgcggcttgtcgacgacggcggtctccgtcgtcaggatcatgaaacacccttttttt

SEQ ID NO: 303 - RNA, 145 nt, synthetic construct
  source 1..145: mol_type = other RNA
gtggtagagggtgtttcacggttttagagctagaaatagcaagttaaaataaggctagtccgttatcaacttgaaaaagtggcaccgagtcggtgcggcttgtcgacgacggcggtctccgtcgtcaggatcatgaaacaccctc

SEQ ID NO: 304 - RNA, 152 nt, synthetic construct
  source 1..152: mol_type = other RNA
gtggtagagggtgtttcacggttttagagctagaaatagcaagttaaaataaggctagtccgttatcaacttgaaaaagtggcaccgagtcggtgcggcttgtcgacgacggcggtctccgtcgtcaggatcatgaaacaccctcttttttt

SEQ ID NO: 305 - RNA, 147 nt, synthetic construct
  source 1..147: mol_type = other RNA
gtggtagagggtgtttcacggttttagagctagaaatagcaagttaaaataaggctagtccgttatcaacttgaaaaagtggcaccgagtcggtgcggcttgtcgacgacggcggtctccgtcgtcaggatcatgaaacaccctcta

SEQ ID NO: 306 - RNA, 154 nt, synthetic construct
  source 1..154: mol_type = other RNA
gtggtagagggtgtttcacggttttagagctagaaatagcaagttaaaataaggctagtccgttatcaacttgaaaaagtggcaccgagtcggtgcggcttgtcgacgacggcggtctccgtcgtcaggatcatgaaacaccctctattttttt

SEQ ID NO: 307 - RNA, 148 nt, synthetic construct
  source 1..148: mol_type = other RNA
gtggtagagggtgtttcacggttttagagctagaaatagcaagttaaaataaggctagtccgttatcaacttgaaaaagtggcaccgagtcggtgcggcttgtcgacgacggcggtctccgtcgtcaggatcatgaaacaccctctac

SEQ ID NO: 308 - RNA, 155 nt, synthetic construct
  source 1..155: mol_type = other RNA
gtggtagagggtgtttcacggttttagagctagaaatagcaagttaaaataaggctagtccgttatcaacttgaaaaagtggcaccgagtcggtgcggcttgtcgacgacggcggtctccgtcgtcaggatcatgaaacaccctctacttttttt

SEQ ID NO: 309 - RNA, 149 nt, synthetic construct
  source 1..149: mol_type = other RNA
gtggtagagggtgtttcacggttttagagctagaaatagcaagttaaaataaggctagtccgttatcaacttgaaaaagtggcaccgagtcggtgcggcttgtcgacgacggcggtctccgtcgtcaggatcatgaaacaccctctacc

SEQ ID NO: 310 - RNA, 156 nt, synthetic construct
  source 1..156: mol_type = other RNA
gtggtagagggtgtttcacggttttagagctagaaatagcaagttaaaataaggctagtccgttatcaacttgaaaaagtggcaccgagtcggtgcggcttgtcgacgacggcggtctccgtcgtcaggatcatgaaacaccctctaccttttttt

SEQ ID NO: 311 - RNA, 150 nt, synthetic construct
  source 1..150: mol_type = other RNA
gtggtagagggtgtttcacggttttagagctagaaatagcaagttaaaataaggctagtccgttatcaacttgaaaaagtggcaccgagtcggtgcggcttgtcgacgacggcggtctccgtcgtcaggatcatgaaacaccctctacca

SEQ ID NO: 312 - RNA, 157 nt, synthetic construct
  source 1..157: mol_type = other RNA
gtggtagagggtgtttcacggttttagagctagaaatagcaagttaaaataaggctagtccgttatcaacttgaaaaagtggcaccgagtcggtgcggcttgtcgacgacggcggtctccgtcgtcaggatcatgaaacaccctctaccattttttt

SEQ ID NO: 313 - RNA, 151 nt, synthetic construct
  source 1..151: mol_type = other RNA
gtggtagagggtgtttcacggttttagagctagaaatagcaagttaaaataaggctagtccgttatcaacttgaaaaagtggcaccgagtcggtgcggcttgtcgacgacggcggtctccgtcgtcaggatcatgaaacaccctctaccac

SEQ ID NO: 314 - RNA, 158 nt, synthetic construct
  source 1..158: mol_type = other RNA
gtggtagagggtgtttcacggttttagagctagaaatagcaagttaaaataaggctagtccgttatcaacttgaaaaagtggcaccgagtcggtgcggcttgtcgacgacggcggtctccgtcgtcaggatcatgaaacaccctctaccacttttttt

SEQ ID NO: 315 - RNA, 146 nt, synthetic construct
  source 1..146: mol_type = other RNA
gtggtagagggtgtttcacggtttaagagcggggaaatccgcaagtttaaataaggctagtccgttatcagcgtgaaaacgcggcaccgagtcggtgcggcttgtcgacgacggcggtctccgtcgtcaggatcatgaaacaccct

SEQ ID NO: 316 - RNA, 153 nt, synthetic construct
  source 1..153: mol_type = other RNA
gtggtagagggtgtttcacggtttaagagcggggaaatccgcaagtttaaataaggctagtccgttatcagcgtgaaaacgcggcaccgagtcggtgcggcttgtcgacgacggcggtctccgtcgtcaggatcatgaaacaccctttttttt

SEQ ID NO: 317 - RNA, 187 nt, synthetic construct
  source 1..187: mol_type = other RNA
gtggtagagggtgtttcacggttttagagctagaaatagcaagttaaaataaggctagtccgttatcaacttgaaaaagtggcaccgagtcggtgcggcttgtcgacgacggcggtctccgtcgtcaggatcatgaaacaccctcaatctcgcggttctatctagttacgcgttaaaccaactagaa

SEQ ID NO: 318 - RNA, 194 nt, synthetic construct
  source 1..194: mol_type = other RNA
gtggtagagggtgtttcacggttttagagctagaaatagcaagttaaaataaggctagtccgttatcaacttgaaaaagtggcaccgagtcggtgcggcttgtcgacgacggcggtctccgtcgtcaggatcatgaaacaccctcaatctcgcggttctatctagttacgcgttaaaccaactagaattttttt

SEQ ID NO: 319 - RNA, 187 nt, synthetic construct
  source 1..187: mol_type = other RNA
gtggtagagggtgtttcacggttttagagctagaaatagcaagttaaaataaggctagtccgttatcaacttgaaaaagtggcaccgagtcggtgcggcttgtcgacgacggcggtctccgtcgtcaggatcatgaaacaccctccccgtcgcggttctatctagttacgcgttaaaccaactagaa

SEQ ID NO: 320 - RNA, 194 nt, synthetic construct
  source 1..194: mol_type = other RNA
gtggtagagggtgtttcacggttttagagctagaaatagcaagttaaaataaggctagtccgttatcaacttgaaaaagtggcaccgagtcggtgcggcttgtcgacgacggcggtctccgtcgtcaggatcatgaaacaccctccccgtcgcggttctatctagttacgcgttaaaccaactagaattttttt

SEQ ID NO: 321 - RNA, 189 nt, synthetic construct
  source 1..189: mol_type = other RNA
gtggtagagggtgtttcacggtttaagagcggggaaatccgcaagtttaaataaggctagtccgttatcagcgtgaaaacgcggcaccgagtcggtgcggcttgtcgacgacggcggtctccgtcgtcaggatcatgaaacaccctatgttacgcggttctatctagttacgcgttaaaccaactagaa

SEQ ID NO: 322 - RNA, 196 nt, synthetic construct
  source 1..196: mol_type = other RNA
gtggtagagggtgtttcacggtttaagagcggggaaatccgcaagtttaaataaggctagtccgttatcagcgtgaaaacgcggcaccgagtcggtgcggcttgtcgacgacggcggtctccgtcgtcaggatcatgaaacaccctatgttacgcggttctatctagttacgcgttaaaccaactagaattttttt

SEQ ID NO: 323 - RNA, 189 nt, synthetic construct
  source 1..189: mol_type = other RNA
gtggtagagggtgtttcacggtttaagagcggggaaatccgcaagtttaaataaggctagtccgttatcagcgtgaaaacgcggcaccgagtcggtgcggcttgtcgacgacggcggtctccgtcgtcaggatcatgaaacaccctatgttgcgcggttctatctagttacgcgttaaaccaactagaa

SEQ ID NO: 324 - RNA, 196 nt, synthetic construct
  source 1..196: mol_type = other RNA
gtggtagagggtgtttcacggtttaagagcggggaaatccgcaagtttaaataaggctagtccgttatcagcgtgaaaacgcggcaccgagtcggtgcggcttgtcgacgacggcggtctccgtcgtcaggatcatgaaacaccctatgttgcgcggttctatctagttacgcgttaaaccaactagaattttttt

SEQ ID NO: 325 - RNA, 146 nt, synthetic construct
  source 1..146: mol_type = other RNA
gtggtagagggtgtttcacggtataagagcggggaaatccgcaagtttatataaggctagtccgttatcagcgtgaaagcgcggcaccgagtcggtgcggcttgtcgacgacggcggtctccgtcgtcaggatcatgaaacaccct

SEQ ID NO: 326 - RNA, 153 nt, synthetic construct
  source 1..153: mol_type = other RNA
gtggtagagggtgtttcacggtataagagcggggaaatccgcaagtttatataaggctagtccgttatcagcgtgaaagcgcggcaccgagtcggtgcggcttgtcgacgacggcggtctccgtcgtcaggatcatgaaacaccctttttttt

SEQ ID NO: 327 - RNA, 146 nt, synthetic construct
  source 1..146: mol_type = other RNA
gtggtagagggtgtttcacggtataagagcggggaaatccgcaagtttatataaggctagtccgttatcagcgtgaaagcgcggcaccgaatcggtgtggcttgtcgacgacggcggtctccgtcgtcaggatcatgaaacaccct

SEQ ID NO: 328 - RNA, 153 nt, synthetic construct
  source 1..153: mol_type = other RNA
gtggtagagggtgtttcacggtataagagcggggaaatccgcaagtttatataaggctagtccgttatcagcgtgaaagcgcggcaccgaatcggtgtggcttgtcgacgacggcggtctccgtcgtcaggatcatgaaacaccctttttttt

SEQ ID NO: 329 - RNA, 148 nt, synthetic construct
  source 1..148: mol_type = other RNA
gtggtagagggtgtttcacggttttagagctagaaatagcaagttaaaataaggctagtccgttatcaacttgaaaaagtggcaccgagtcggtgcggcttgtcgacgacggcggtctccgtcgtcaggatcatgaaacacccttttt

SEQ ID NO: 330 - RNA, 150 nt, synthetic construct
  source 1..150: mol_type = other RNA
gtggtagagggtgtttcacggttttagagctagaaatagcaagttaaaataaggctagtccgttatcaacttgaaaaagtggcaccgagtcggtgcggcttgtcgacgacggcggtctccgtcgtcaggatcatgaaacaccctcttttt

SEQ ID NO: 331 - RNA, 20 nt, synthetic construct
  source 1..20: mol_type = other RNA
caagactaacctggccaaca

SEQ ID NO: 332 - RNA, 17 nt, synthetic construct
  source 1..17: mol_type = other RNA
gactaacctggccaaca

SEQ ID NO: 333 - RNA, 18 nt, synthetic construct
  source 1..18: mol_type = other RNA
agactaacctggccaaca

SEQ ID NO: 334 - RNA, 19 nt, synthetic construct
  source 1..19: mol_type = other RNA
aagactaacctggccaaca

SEQ ID NO: 335 - RNA, 21 nt, synthetic construct
  source 1..21: mol_type = other RNA
tcaagactaacctggccaaca

SEQ ID NO: 336 - RNA, 22 nt, synthetic construct
  source 1..22: mol_type = other RNA
ttcaagactaacctggccaaca

SEQ ID NO: 337-341 - skipped (5 entries)

SEQ ID NO: 342 - RNA, 10 nt, synthetic construct
  source 1..10: mol_type = other RNA
tggccaggtt

SEQ ID NO: 343 - RNA, 11 nt, synthetic construct
  source 1..11: mol_type = other RNA
tggccaggtta

SEQ ID NO: 344 - RNA, 12 nt, synthetic construct
  source 1..12: mol_type = other RNA
tggccaggttag

SEQ ID NO: 345 - RNA, 13 nt, synthetic construct
  source 1..13: mol_type = other RNA
tggccaggttagt

SEQ ID NO: 346 - RNA, 14 nt, synthetic construct
  source 1..14: mol_type = other RNA
tggccaggttagtc

SEQ ID NO: 347 - RNA, 15 nt, synthetic construct
  source 1..15: mol_type = other RNA
tggccaggttagtct

SEQ ID NO: 348 - RNA, 16 nt, synthetic construct
  source 1..16: mol_type = other RNA
tggccaggttagtctt

SEQ ID NO: 349 - RNA, 17 nt, synthetic construct
  source 1..17: mol_type = other RNA
tggccaggttagtcttg

SEQ ID NO: 350 - RNA, 18 nt, synthetic construct
  source 1..18: mol_type = other RNA
tggccaggttagtcttga

SEQ ID NO: 351 - RNA, 19 nt, synthetic construct
  source 1..19: mol_type = other RNA
tggccaggttagtcttgaa

SEQ ID NO: 352 - RNA, 145 nt, synthetic construct
  source 1..145: mol_type = other RNA
caagactaacctggccaacagttttagagctagaaatagcaagttaaaataaggctagtccgttatcaacttgaaaaagtggcaccgagtcggtgcggcttgtcgacgacggcggtctccgtcgtcaggatcattggccaggtta

SEQ ID NO: 353 - RNA, 153 nt, synthetic construct
  source 1..153: mol_type = other RNA
gcaagactaacctggccaacagttttagagctagaaatagcaagttaaaataaggctagtccgttatcaacttgaaaaagtggcaccgagtcggtgcggcttgtcgacgacggcggtctccgtcgtcaggatcattggccaggttattttttt

SEQ ID NO: 354 - RNA, 147 nt, synthetic construct
  source 1..147: mol_type = other RNA
caagactaacctggccaacagttttagagctagaaatagcaagttaaaataaggctagtccgttatcaacttgaaaaagtggcaccgagtcggtgcggcttgtcgacgacggcggtctccgtcgtcaggatcattggccaggttagt

SEQ ID NO: 355 - RNA, 155 nt, synthetic construct
  source 1..155: mol_type = other RNA
gcaagactaacctggccaacagttttagagctagaaatagcaagttaaaataaggctagtccgttatcaacttgaaaaagtggcaccgagtcggtgcggcttgtcgacgacggcggtctccgtcgtcaggatcattggccaggttagtttttttt

SEQ ID NO: 356 - skipped

SEQ ID NO: 357 - RNA, 147 nt, synthetic construct
  source 1..147: mol_type = other RNA
caagactaacctggccaacagttttagagctagaaatagcaagttaaaataaggctagtccgttatcaacttgaaaaagtggcaccgagtcggtgcggcttgtcgacgacggcggtctccgtcgtcaggatcattggccaggatttt

SEQ ID NO: 358 - RNA, 143 nt, synthetic construct
  source 1..143: mol_type = other RNA
caagactaacctggccaacagttttagagctagaaatagcaagttaaaataaggctagtccgttatcaacttgaaaaagtggcaccgagtcggtgcggcttgtcgacgacggcggtctccgtcgtcaggatcattggccagga

SEQ ID NO: 359 - RNA, 149 nt, synthetic construct
  source 1..149: mol_type = other RNA
caagactaacctggccaacagttttagagctagaaatagcaagttaaaataaggctagtccgttatcaacttgaaaaagtggcaccgagtcggtgcggcttgtcgacgacggcggtctccgtcgtcaggatcattggccaggttatttt

SEQ ID NO: 360 - RNA, 151 nt, synthetic construct
  source 1..151: mol_type = other RNA
caagactaacctggccaacagttttagagctagaaatagcaagttaaaataaggctagtccgttatcaacttgaaaaagtggcaccgagtcggtgcggcttgtcgacgacggcggtctccgtcgtcaggatcattggccaggttagttttt

SEQ ID NO: 361 - RNA, 142 nt, synthetic construct
  source 1..142: mol_type = other RNA
caagactaacctggccaacagttttagagctagaaatagcaagttaaaataaggctagtccgttatcaacttgaaaaagtggcaccgagtcggtgcggcttgtcgacgacggcggtctccgtcgtcaggatcattggccagg

SEQ ID NO: 362 - RNA, 20 nt, synthetic construct
  source 1..20: mol_type = other RNA
aaggtggatcacctgaggtc

SEQ ID NO: 363 - RNA, 17 nt, synthetic construct
  source 1..17: mol_type = other RNA
gtggatcacctgaggtc

SEQ ID NO: 364 - RNA, 18 nt, synthetic construct
  source 1..18: mol_type = other RNA
ggtggatcacctgaggtc

SEQ ID NO: 365 - RNA, 19 nt, synthetic construct
  source 1..19: mol_type = other RNA
aggtggatcacctgaggtc

SEQ ID NO: 366 - RNA, 21 nt, synthetic construct
  source 1..21: mol_type = other RNA
gaaggtggatcacctgaggtc

SEQ ID NO: 367 - RNA, 22 nt, synthetic construct
  source 1..22: mol_type = other RNA
ggaaggtggatcacctgaggtc

SEQ ID NO: 368-372 - skipped (5 entries)

SEQ ID NO: 373 - RNA, 10 nt, synthetic construct
  source 1..10: mol_type = other RNA
ctcaggtgat

SEQ ID NO: 374 - RNA, 11 nt, synthetic construct
  source 1..11: mol_type = other RNA
ctcaggtgatc

SEQ ID NO: 375 - RNA, 12 nt, synthetic construct
  source 1..12: mol_type = other RNA
ctcaggtgatcc

SEQ ID NO: 376 - RNA, 13 nt, synthetic construct
  source 1..13: mol_type = other RNA
ctcaggtgatcca

SEQ ID NO: 377 - RNA, 14 nt, synthetic construct
  source 1..14: mol_type = other RNA
ctcaggtgatccac

SEQ ID NO: 378 - RNA, 15 nt, synthetic construct
  source 1..15: mol_type = other RNA
ctcaggtgatccacc

SEQ ID NO: 379 - RNA, 16 nt, synthetic construct
  source 1..16: mol_type = other RNA
ctcaggtgatccacct

SEQ ID NO: 380 - RNA, 17 nt, synthetic construct
  source 1..17: mol_type = other RNA
ctcaggtgatccacctt

SEQ ID NO: 381 - RNA, 18 nt, synthetic construct
  source 1..18: mol_type = other RNA
ctcaggtgatccaccttc

SEQ ID NO: 382 - RNA, 19 nt, synthetic construct
  source 1..19: mol_type = other RNA
ctcaggtgatccaccttcc

SEQ ID NO: 383 - RNA, 144 nt, synthetic construct
  source 1..144: mol_type = other RNA
aaggtggatcacctgaggtcgttttagagctagaaatagcaagttaaaataaggctagtccgttatcaacttgaaaaagtggcaccgagtcggtgcggcttgtcgacgacggcggtctccgtcgtcaggatcatctcaggtgat

SEQ ID NO: 384 - RNA, 152 nt, synthetic construct
  source 1..152: mol_type = other RNA
gaaggtggatcacctgaggtcgttttagagctagaaatagcaagttaaaataaggctagtccgttatcaacttgaaaaagtggcaccgagtcggtgcggcttgtcgacgacggcggtctccgtcgtcaggatcatctcaggtgatttttttt

SEQ ID NO: 385 - RNA, 146 nt, synthetic construct
  source 1..146: mol_type = other RNA
aaggtggatcacctgaggtcgttttagagctagaaatagcaagttaaaataaggctagtccgttatcaacttgaaaaagtggcaccgagtcggtgcggcttgtcgacgacggcggtctccgtcgtcaggatcatctcaggtgatcc

SEQ ID NO: 386 - RNA, 154 nt, synthetic construct
  source 1..154: mol_type = other RNA
gaaggtggatcacctgaggtcgttttagagctagaaatagcaagttaaaataaggctagtccgttatcaacttgaaaaagtggcaccgagtcggtgcggcttgtcgacgacggcggtctccgtcgtcaggatcatctcaggtgatccttttttt

SEQ ID NO: 387 - RNA, 146 nt, synthetic construct
  source 1..146: mol_type = other RNA
aaggtggatcacctgaggtcgttttagagctagaaatagcaagttaaaataaggctagtccgttatcaacttgaaaaagtggcaccgagtcggtgcggcttgtcgacgacggcggtctccgtcgtcaggatcatctcaggtgtttt

SEQ ID NO: 388 - RNA, 142 nt, synthetic construct
  source 1..142: mol_type = other RNA
aaggtggatcacctgaggtcgttttagagctagaaatagcaagttaaaataaggctagtccgttatcaacttgaaaaagtggcaccgagtcggtgcggcttgtcgacgacggcggtctccgtcgtcaggatcatctcaggtg

SEQ ID NO: 389 - RNA, 148 nt, synthetic construct
  source 1..148: mol_type = other RNA
aaggtggatcacctgaggtcgttttagagctagaaatagcaagttaaaataaggctagtccgttatcaacttgaaaaagtggcaccgagtcggtgcggcttgtcgacgacggcggtctccgtcgtcaggatcatctcaggtgattttt

SEQ ID NO: 390 - RNA, 150 nt, synthetic construct
  source 1..150: mol_type = other RNA
aaggtggatcacctgaggtcgttttagagctagaaatagcaagttaaaataaggctagtccgttatcaacttgaaaaagtggcaccgagtcggtgcggcttgtcgacgacggcggtctccgtcgtcaggatcatctcaggtgatcctttt

SEQ ID NO: 391 - RNA, 20 nt, synthetic construct
  source 1..20: mol_type = other RNA
ctaggaaggtggatcacctg

SEQ ID NO: 392 - RNA, 17 nt, synthetic construct
  source 1..17: mol_type = other RNA
ggaaggtggatcacctg

SEQ ID NO: 393 - RNA, 18 nt, synthetic construct
  source 1..18: mol_type = other RNA
aggaaggtggatcacctg

SEQ ID NO: 394 - RNA, 19 nt, synthetic construct
  source 1..19: mol_type = other RNA
taggaaggtggatcacctg

SEQ ID NO: 395 - RNA, 21 nt, synthetic construct
  source 1..21: mol_type = other RNA
cctaggaaggtggatcacctg

SEQ ID NO: 396 - RNA, 22 nt, synthetic construct
  source 1..22: mol_type = other RNA
gcctaggaaggtggatcacctg

SEQ ID NO: 397-401 - skipped (5 entries)

SEQ ID NO: 402 - RNA, 10 nt, synthetic construct
  source 1..10: mol_type = other RNA
gtgatccacc

SEQ ID NO: 403 - RNA, 11 nt, synthetic construct
  source 1..11: mol_type = other RNA
gtgatccacct

SEQ ID NO: 404 - RNA, 12 nt, synthetic construct
  source 1..12: mol_type = other RNA
gtgatccacctt

SEQ ID NO: 405 - RNA, 13 nt, synthetic construct
  source 1..13: mol_type = other RNA
gtgatccaccttc

SEQ ID NO: 406 - RNA, 14 nt, synthetic construct
  source 1..14: mol_type = other RNA
gtgatccaccttcc

SEQ ID NO: 407 - RNA, 15 nt, synthetic construct
  source 1..15: mol_type = other RNA
gtgatccaccttcct

SEQ ID NO: 408 - RNA, 16 nt, synthetic construct
  source 1..16: mol_type = other RNA
gtgatccaccttccta

SEQ ID NO: 409 - RNA, 17 nt, synthetic construct
  source 1..17: mol_type = other RNA
gtgatccaccttcctag

SEQ ID NO: 410 - RNA, 18 nt, synthetic construct
  source 1..18: mol_type = other RNA
gtgatccaccttcctagg

SEQ ID NO: 411 - RNA, 19 nt, synthetic construct
  source 1..19: mol_type = other RNA
gtgatccaccttcctaggc

SEQ ID NO: 412 - RNA, 144 nt, synthetic construct
  source 1..144: mol_type = other RNA
ctaggaaggtggatcacctggttttagagctagaaatagcaagttaaaataaggctagtccgttatcaacttgaaaaagtggcaccgagtcggtgcggcttgtcgacgacggcggtctccgtcgtcaggatcatgtgatccacc

SEQ ID NO: 413 - RNA, 153 nt, synthetic construct
  source 1..153: mol_type = other RNA
gctaggaaggtggatcacctggttttagagctagaaatagcaagttaaaataaggctagtccgttatcaacttgaaaaagtggcaccgagtcggtgcggcttgtcgacgacggcggtctccgtcgtcaggatcatgtgatccaccattttttt

SEQ ID NO: 414 - RNA, 147 nt, synthetic construct
  source 1..147: mol_type = other RNA
ctaggaaggtggatcacctggttttagagctagaaatagcaagttaaaataaggctagtccgttatcaacttgaaaaagtggcaccgagtcggtgcggcttgtcgacgacggcggtctccgtcgtcaggatcatgtgatccaccttc

SEQ ID NO: 415 - RNA, 155 nt, synthetic construct
  source 1..155: mol_type = other RNA
gctaggaaggtggatcacctggttttagagctagaaatagcaagttaaaataaggctagtccgttatcaacttgaaaaagtggcaccgagtcggtgcggcttgtcgacgacggcggtctccgtcgtcaggatcatgtgatccaccttcttttttt

SEQ ID NO: 416 - skipped

SEQ ID NO: 417 - RNA, 146 nt, synthetic construct
  source 1..146: mol_type = other RNA
ctaggaaggtggatcacctggttttagagctagaaatagcaagttaaaataaggctagtccgttatcaacttgaaaaagtggcaccgagtcggtgcggcttgtcgacgacggcggtctccgtcgtcaggatcatgtgatccatttt

SEQ ID NO: 418 - RNA, 142 nt, synthetic construct
  source 1..142: mol_type = other RNA
ctaggaaggtggatcacctggttttagagctagaaatagcaagttaaaataaggctagtccgttatcaacttgaaaaagtggcaccgagtcggtgcggcttgtcgacgacggcggtctccgtcgtcaggatcatgtgatcca

SEQ ID NO: 419 - RNA, 149 nt, synthetic construct
  source 1..149: mol_type = other RNA
ctaggaaggtggatcacctggttttagagctagaaatagcaagttaaaataaggctagtccgttatcaacttgaaaaagtggcaccgagtcggtgcggcttgtcgacgacggcggtctccgtcgtcaggatcatgtgatccaccatttt

SEQ ID NO: 420 - RNA, 145 nt, synthetic construct
  source 1..145: mol_type = other RNA
ctaggaaggtggatcacctggttttagagctagaaatagcaagttaaaataaggctagtccgttatcaacttgaaaaagtggcaccgagtcggtgcggcttgtcgacgacggcggtctccgtcgtcaggatcatgtgatccacca

SEQ ID NO: 421 - RNA, 151 nt, synthetic construct
  source 1..151: mol_type = other RNA
ctaggaaggtggatcacctggttttagagctagaaatagcaagttaaaataaggctagtccgttatcaacttgaaaaagtggcaccgagtcggtgcggcttgtcgacgacggcggtctccgtcgtcaggatcatgtgatccaccttctttt

SEQ ID NO: 422 - RNA, 20 nt, synthetic construct
  source 1..20: mol_type = other RNA
ctttgggaggcctaggaagg

SEQ ID NO: 423 - RNA, 17 nt, synthetic construct
  source 1..17: mol_type = other RNA
tgggaggcctaggaagg

SEQ ID NO: 424 - RNA, 18 nt, synthetic construct
  source 1..18: mol_type = other RNA
ttgggaggcctaggaagg

SEQ ID NO: 425 - RNA, 19 nt, synthetic construct
  source 1..19: mol_type = other RNA
tttgggaggcctaggaagg

SEQ ID NO: 426 - RNA, 21 nt, synthetic construct
  source 1..21: mol_type = other RNA
actttgggaggcctaggaagg

SEQ ID NO: 427 - RNA, 22 nt, synthetic construct
  source 1..22: mol_type = other RNA
cactttgggaggcctaggaagg

SEQ ID NO: 428-432 - skipped (5 entries)

SEQ ID NO: 433 - RNA, 10 nt, synthetic construct
  source 1..10: mol_type = other RNA
tcctaggcct

SEQ ID NO: 434 - RNA, 11 nt, synthetic construct
  source 1..11: mol_type = other RNA
tcctaggcctc

SEQ ID NO: 435 - RNA, 12 nt, synthetic construct
  source 1..12: mol_type = other RNA
tcctaggcctcc

SEQ ID NO: 436 - RNA, 13 nt, synthetic construct
  source 1..13: mol_type = other RNA
tcctaggcctccc

SEQ ID NO: 437 - RNA, 14 nt, synthetic construct
  source 1..14: mol_type = other RNA
tcctaggcctccca

SEQ ID NO: 438 - RNA, 15 nt, synthetic construct
  source 1..15: mol_type = other RNA
tcctaggcctcccaa

SEQ ID NO: 439 - RNA, 16 nt, synthetic construct
  source 1..16: mol_type = other RNA
tcctaggcctcccaaa

SEQ ID NO: 440 - RNA, 17 nt, synthetic construct
  source 1..17: mol_type = other RNA
tcctaggcctcccaaag

SEQ ID NO: 441 - RNA, 18 nt, synthetic construct
  source 1..18: mol_type = other RNA
tcctaggcctcccaaagt

SEQ ID NO: 442 - RNA, 19 nt, synthetic construct
  source 1..19: mol_type = other RNA
tcctaggcctcccaaagtg

SEQ ID NO: 443 - RNA, 144 nt, synthetic construct
  source 1..144: mol_type = other RNA
ctttgggaggcctaggaagggttttagagctagaaatagcaagttaaaataaggctagtccgttatcaacttgaaaaagtggcaccgagtcggtgcggcttgtcgacgacggcggtctccgtcgtcaggatcattcctaggcct

SEQ ID NO: 444 - RNA, 152 nt, synthetic construct
  source 1..152: mol_type = other RNA
gctttgggaggcctaggaagggttttagagctagaaatagcaagttaaaataaggctagtccgttatcaacttgaaaaagtggcaccgagtcggtgcggcttgtcgacgacggcggtctccgtcgtcaggatcattcctaggcctttttttt

SEQ ID NO: 445 - RNA, 146 nt, synthetic construct
  source 1..146: mol_type = other RNA
ctttgggaggcctaggaagggttttagagctagaaatagcaagttaaaataaggctagtccgttatcaacttgaaaaagtggcaccgagtcggtgcggcttgtcgacgacggcggtctccgtcgtcaggatcattcctaggcctcc

SEQ ID NO: 446 - RNA, 154 nt, synthetic construct
  source 1..154: mol_type = other RNA
gctttgggaggcctaggaagggttttagagctagaaatagcaagttaaaataaggctagtccgttatcaacttgaaaaagtggcaccgagtcggtgcggcttgtcgacgacggcggtctccgtcgtcaggatcattcctaggcctccttttttt

SEQ ID NO: 447 - RNA, 146 nt, synthetic construct
  source 1..146: mol_type = other RNA
ctttgggaggcctaggaagggttttagagctagaaatagcaagttaaaataaggctagtccgttatcaacttgaaaaagtggcaccgagtcggtgcggcttgtcgacgacggcggtctccgtcgtcaggatcattcctaggctttt

SEQ ID NO: 448 - RNA, 142 nt, synthetic construct
  source 1..142: mol_type = other RNA
ctttgggaggcctaggaagggttttagagctagaaatagcaagttaaaataaggctagtccgttatcaacttgaaaaagtggcaccgagtcggtgcggcttgtcgacgacggcggtctccgtcgtcaggatcattcctaggc

SEQ ID NO: 449 - RNA, 148 nt, synthetic construct
  source 1..148: mol_type = other RNA
ctttgggaggcctaggaagggttttagagctagaaatagcaagttaaaataaggctagtccgttatcaacttgaaaaagtggcaccgagtcggtgcggcttgtcgacgacggcggtctccgtcgtcaggatcattcctaggccttttt

SEQ ID NO: 450 - RNA, 150 nt, synthetic construct
  source 1..150: mol_type = other RNA
ctttgggaggcctaggaagggttttagagctagaaatagcaagttaaaataaggctagtccgttatcaacttgaaaaagtggcaccgagtcggtgcggcttgtcgacgacggcggtctccgtcgtcaggatcattcctaggcctcctttt

SEQ ID NO: 451 - RNA, 20 nt, synthetic construct
  source 1..20: mol_type = other RNA
cataatctcagcactttggg

SEQ ID NO: 452 - RNA, 17 nt, synthetic construct
  source 1..17: mol_type = other RNA
aatctcagcactttggg

SEQ ID NO: 453 - RNA, 18 nt, synthetic construct
  source 1..18: mol_type = other RNA
taatctcagcactttggg

SEQ ID NO: 454 - RNA, 19 nt, synthetic construct
  source 1..19: mol_type = other RNA
ataatctcagcactttggg

SEQ ID NO: 455 - RNA, 21 nt, synthetic construct
  source 1..21: mol_type = other RNA
ccataatctcagcactttggg

SEQ ID NO: 456 - RNA, 22 nt, synthetic construct
  source 1..22: mol_type = other RNA
cccataatctcagcactttggg

SEQ ID NO: 457-461 - skipped (5 entries)

SEQ ID NO: 462 - RNA, 10 nt, synthetic construct
  source 1..10: mol_type = other RNA
aaagtgctga

SEQ ID NO: 463 - RNA, 11 nt, synthetic construct
  source 1..11: mol_type = other RNA
aaagtgctgag

SEQ ID NO: 464 - RNA, 12 nt, synthetic construct
  source 1..12: mol_type = other RNA
aaagtgctgaga

SEQ ID NO: 465 - RNA, 13 nt, synthetic construct
  source 1..13: mol_type = other RNA
aaagtgctgagat

SEQ ID NO: 466 - RNA, 14 nt, synthetic construct
  source 1..14: mol_type = other RNA
aaagtgctgagatt

SEQ ID NO: 467 - RNA, 15 nt, synthetic construct
  source 1..15: mol_type = other RNA
aaagtgctgagatta

SEQ ID NO: 468 - RNA, 16 nt, synthetic construct
  source 1..16: mol_type = other RNA
aaagtgctgagattat

SEQ ID NO: 469 - RNA, 17 nt, synthetic construct
  source 1..17: mol_type = other RNA
aaagtgctgagattatg

SEQ ID NO: 470 - RNA, 18 nt, synthetic construct
  source 1..18: mol_type = other RNA
aaagtgctgagattatgg

SEQ ID NO: 471 - RNA, 19 nt, synthetic construct
  source 1..19: mol_type = other RNA
aaagtgctgagattatggg

SEQ ID NO: 472 - RNA, 144 nt, synthetic construct
  source 1..144: mol_type = other RNA
cataatctcagcactttggggttttagagctagaaatagcaagttaaaataaggctagtccgttatcaacttgaaaaagtggcaccgagtcggtgcggcttgtcgacgacggcggtctccgtcgtcaggatcataaagtgctga

SEQ ID NO: 473 - RNA, 152 nt, synthetic construct
  source 1..152: mol_type = other RNA
gcataatctcagcactttggggttttagagctagaaatagcaagttaaaataaggctagtccgttatcaacttgaaaaagtggcaccgagtcggtgcggcttgtcgacgacggcggtctccgtcgtcaggatcataaagtgctgattttttt

SEQ ID NO: 474 - RNA, 146 nt, synthetic construct
  source 1..146: mol_type = other RNA
cataatctcagcactttggggttttagagctagaaatagcaagttaaaataaggctagtccgttatcaacttgaaaaagtggcaccgagtcggtgcggcttgtcgacgacggcggtctccgtcgtcaggatcataaagtgctgaga

SEQ ID NO: 475 - RNA, 155 nt, synthetic construct
  source 1..155: mol_type = other RNA
gcataatctcagcactttggggttttagagctagaaatagcaagttaaaataaggctagtccgttatcaacttgaaaaagtggcaccgagtcggtgcggcttgtcgacgacggcggtctccgtcgtcaggatcataaagtgctgagaattttttt

SEQ ID NO: 476 - skipped

SEQ ID NO: 477 - RNA, 146 nt, synthetic construct
  source 1..146: mol_type = other RNA
cataatctcagcactttggggttttagagctagaaatagcaagttaaaataaggctagtccgttatcaacttgaaaaagtggcaccgagtcggtgcggcttgtcgacgacggcggtctccgtcgtcaggatcataaagtgcttttt

SEQ ID NO: 478 - RNA, 142 nt, synthetic construct
  source 1..142: mol_type = other RNA
cataatctcagcactttggggttttagagctagaaatagcaagttaaaataaggctagtccgttatcaacttgaaaaagtggcaccgagtcggtgcggcttgtcgacgacggcggtctccgtcgtcaggatcataaagtgct

SEQ ID NO: 479 - RNA, 148 nt, synthetic construct
  source 1..148: mol_type = other RNA
cataatctcagcactttggggttttagagctagaaatagcaagttaaaataaggctagtccgttatcaacttgaaaaagtggcaccgagtcggtgcggcttgtcgacgacggcggtctccgtcgtcaggatcataaagtgctgatttt

SEQ ID NO: 480 - RNA, 151 nt, synthetic construct
  source 1..151: mol_type = other RNA
cataatctcagcactttggggttttagagctagaaatagcaagttaaaataaggctagtccgttatcaacttgaaaaagtggcaccgagtcggtgcggcttgtcgacgacggcggtctccgtcgtcaggatcataaagtgctgagaatttt

SEQ ID NO: 481 - RNA, 147 nt, synthetic construct
  source 1..147: mol_type = other RNA
cataatctcagcactttggggttttagagctagaaatagcaagttaaaataaggctagtccgttatcaacttgaaaaagtggcaccgagtcggtgcggcttgtcgacgacggcggtctccgtcgtcaggatcataaagtgctgagaa

SEQ ID NO: 482 - RNA, 20 nt, synthetic construct
  source 1..20: mol_type = other RNA
caggcgcgcgacaccacgcc

SEQ ID NO: 483 - RNA, 17 nt, synthetic construct
  source 1..17: mol_type = other RNA
gcgcgcgacaccacgcc

SEQ ID NO: 484 - RNA, 18 nt, synthetic construct
  source 1..18: mol_type = other RNA
ggcgcgcgacaccacgcc

SEQ ID NO: 485 - RNA, 19 nt, synthetic construct
  source 1..19: mol_type = other RNA
aggcgcgcgacaccacgcc

SEQ ID NO: 486 - RNA, 21 nt, synthetic construct
  source 1..21: mol_type = other RNA
acaggcgcgcgacaccacgcc

SEQ ID NO: 487 - RNA, 22 nt, synthetic construct
  source 1..22: mol_type = other RNA
tacaggcgcgcgacaccacgcc

SEQ ID NO: 488-492 - skipped (5 entries)

SEQ ID NO: 493 - RNA, 10 nt, synthetic construct
  source 1..10: mol_type = other RNA
gtggtgtcgc

SEQ ID NO: 494 - RNA, 11 nt, synthetic construct
  source 1..11: mol_type = other RNA
gtggtgtcgcg

SEQ ID NO: 495 - RNA, 12 nt, synthetic construct
  source 1..12: mol_type = other RNA
gtggtgtcgcgc

SEQ ID NO: 496 - RNA, 13 nt, synthetic construct
  source 1..13: mol_type = other RNA
gtggtgtcgcgcg

SEQ ID NO: 497 - RNA, 14 nt, synthetic construct
  source 1..14: mol_type = other RNA
gtggtgtcgcgcgc

SEQ ID NO: 498 - RNA, 15 nt, synthetic construct
  source 1..15: mol_type = other RNA
gtggtgtcgcgcgcc

SEQ ID NO: 499 - RNA, 16 nt, synthetic construct
  source 1..16: mol_type = other RNA
gtggtgtcgcgcgcct

SEQ ID NO: 500 - RNA, 17 nt, synthetic construct
  source 1..17: mol_type = other RNA
gtggtgtcgcgcgcctg

SEQ ID NO: 501 - RNA, 18 nt, synthetic construct
  source 1..18: mol_type = other RNA
gtggtgtcgcgcgcctgt

SEQ ID NO: 502 - RNA, 19 nt, synthetic construct
  source 1..19: mol_type = other RNA
gtggtgtcgcgcgcctgta

SEQ ID NO: 503 - RNA, 144 nt, synthetic construct
  source 1..144: mol_type = other RNA
caggcgcgcgacaccacgccgttttagagctagaaatagcaagttaaaataaggctagtccgttatcaacttgaaaaagtggcaccgagtcggtgcatgatcctgacgacggagaccgccgtcgtcgacaagccgtggtgtcgc

SEQ ID NO: 504 - RNA, 152 nt, synthetic construct
  source 1..152: mol_type = other RNA
gcaggcgcgcgacaccacgccgttttagagctagaaatagcaagttaaaataaggctagtccgttatcaacttgaaaaagtggcaccgagtcggtgcatgatcctgacgacggagaccgccgtcgtcgacaagccgtggtgtcgcttttttt

SEQ ID NO: 505 - RNA, 146 nt, synthetic construct
  source 1..146: mol_type = other RNA
caggcgcgcgacaccacgccgttttagagctagaaatagcaagttaaaataaggctagtccgttatcaacttgaaaaagtggcaccgagtcggtgcatgatcctgacgacggagaccgccgtcgtcgacaagccgtggtgtcgcgc

SEQ ID NO: 506 - RNA, 154 nt, synthetic construct
  source 1..154: mol_type = other RNA
gcaggcgcgcgacaccacgccgttttagagctagaaatagcaagttaaaataaggctagtccgttatcaacttgaaaaagtggcaccgagtcggtgcatgatcctgacgacggagaccgccgtcgtcgacaagccgtggtgtcgcgcttttttt

SEQ ID NO: 507 - RNA, 146 nt, synthetic construct
  source 1..146: mol_type = other RNA
caggcgcgcgacaccacgccgttttagagctagaaatagcaagttaaaataaggctagtccgttatcaacttgaaaaagtggcaccgagtcggtgcatgatcctgacgacggagaccgccgtcgtcgacaagccgtggtgtctttt

SEQ ID NO: 508 - RNA, 142 nt, synthetic construct
  source 1..142: mol_type = other RNA
caggcgcgcgacaccacgccgttttagagctagaaatagcaagttaaaataaggctagtccgttatcaacttgaaaaagtggcaccgagtcggtgcatgatcctgacgacggagaccgccgtcgtcgacaagccgtggtgtc

SEQ ID NO: 509 - RNA, 148 nt, synthetic construct
  source 1..148: mol_type = other RNA
caggcgcgcgacaccacgccgttttagagctagaaatagcaagttaaaataaggctagtccgttatcaacttgaaaaagtggcaccgagtcggtgcatgatcctgacgacggagaccgccgtcgtcgacaagccgtggtgtcgctttt

SEQ ID NO: 510 - RNA, 150 nt, synthetic construct
  source 1..150: mol_type = other RNA
caggcgcgcgacaccacgccgttttagagctagaaatagcaagttaaaataaggctagtccgttatcaacttgaaaaagtggcaccgagtcggtgcatgatcctgacgacggagaccgccgtcgtcgacaagccgtggtgtcgcgctttt

SEQ ID NO: 511 - RNA, 20 nt, synthetic construct
  source 1..20: mol_type = other RNA
ccgcagcctctggagtagct

SEQ ID NO: 512 - RNA, 17 nt, synthetic construct
  source 1..17: mol_type = other RNA
cagcctctggagtagct

SEQ ID NO: 513 - RNA, 18 nt, synthetic construct
  source 1..18: mol_type = other RNA
gcagcctctggagtagct

SEQ ID NO: 514 - RNA, 19 nt, synthetic construct
  source 1..19: mol_type = other RNA
cgcagcctctggagtagct

SEQ ID NO: 515 - RNA, 21 nt, synthetic construct
  source 1..21: mol_type = other RNA
gccgcagcctctggagtagct

SEQ ID NO: 516 - RNA, 22 nt, synthetic construct
  source 1..22: mol_type = other RNA
tgccgcagcctctggagtagct

SEQ ID NO: 517-521 - skipped (5 entries)

SEQ ID NO: 522 - RNA, 10 nt, synthetic construct
  source 1..10: mol_type = other RNA
tactccagag

SEQ ID NO: 523 - RNA, 11 nt, synthetic construct
  source 1..11: mol_type = other RNA
tactccagagg

SEQ ID NO: 524 - RNA, 12 nt, synthetic construct
  source 1..12: mol_type = other RNA
tactccagaggc

SEQ ID NO: 525 - RNA, 13 nt, synthetic construct
  source 1..13: mol_type = other RNA
tactccagaggct

SEQ ID NO: 526 - RNA, 14 nt, synthetic construct
  source 1..14: mol_type = other RNA
tactccagaggctg

SEQ ID NO: 527 - RNA, 15 nt, synthetic construct
  source 1..15: mol_type = other RNA
tactccagaggctgc

SEQ ID NO: 528 - RNA, 16 nt, synthetic construct
  source 1..16: mol_type = other RNA
tactccagaggctgcg

SEQ ID NO: 529 - RNA, 17 nt, synthetic construct
  source 1..17: mol_type = other RNA
tactccagaggctgcgg

SEQ ID NO: 530 - RNA, 18 nt, synthetic construct
  source 1..18: mol_type = other RNA
tactccagaggctgcggc

SEQ ID NO: 531 - RNA, 19 nt, synthetic construct
  source 1..19: mol_type = other RNA
tactccagaggctgcggca

SEQ ID NO: 532 - RNA, 144 nt, synthetic construct
  source 1..144: mol_type = other RNA
ccgcagcctctggagtagctgttttagagctagaaatagcaagttaaaataaggctagtccgttatcaacttgaaaaagtggcaccgagtcggtgcatgatcctgacgacggagaccgccgtcgtcgacaagcctactccagag

SEQ ID NO: 533 - RNA, 152 nt, synthetic construct
  source 1..152: mol_type = other RNA
gccgcagcctctggagtagctgttttagagctagaaatagcaagttaaaataaggctagtccgttatcaacttgaaaaagtggcaccgagtcggtgcatgatcctgacgacggagaccgccgtcgtcgacaagcctactccagagttttttt

SEQ ID NO: 534 - RNA, 146 nt, synthetic construct
  source 1..146: mol_type = other RNA
ccgcagcctctggagtagctgttttagagctagaaatagcaagttaaaataaggctagtccgttatcaacttgaaaaagtggcaccgagtcggtgcatgatcctgacgacggagaccgccgtcgtcgacaagcctactccagaggc

SEQ ID NO: 535 - RNA, 155 nt, synthetic construct
  source 1..155: mol_type = other RNA
gccgcagcctctggagtagctgttttagagctagaaatagcaagttaaaataaggctagtccgttatcaacttgaaaaagtggcaccgagtcggtgcatgatcctgacgacggagaccgccgtcgtcgacaagcctactccagaggcattttttt

SEQ ID NO: 536 - skipped

SEQ ID NO: 537 - RNA, 146 nt, synthetic construct
  source 1..146: mol_type = other RNA
ccgcagcctctggagtagctgttttagagctagaaatagcaagttaaaataaggctagtccgttatcaacttgaaaaagtggcaccgagtcggtgcatgatcctgacgacggagaccgccgtcgtcgacaagcctactccagtttt

SEQ ID NO: 538 - RNA, 142 nt, synthetic construct
  source 1..142: mol_type = other RNA
ccgcagcctctggagtagctgttttagagctagaaatagcaagttaaaataaggctagtccgttatcaacttgaaaaagtggcaccgagtcggtgcatgatcctgacgacggagaccgccgtcgtcgacaagcctactccag

SEQ ID NO: 539 - RNA, 148 nt, synthetic construct
  source 1..148: mol_type = other RNA
ccgcagcctctggagtagctgttttagagctagaaatagcaagttaaaataaggctagtccgttatcaacttgaaaaagtggcaccgagtcggtgcatgatcctgacgacggagaccgccgtcgtcgacaagcctactccagagtttt

SEQ ID NO: 540 - RNA, 151 nt, synthetic construct
  source 1..151: mol_type = other RNA
ccgcagcctctggagtagctgttttagagctagaaatagcaagttaaaataaggctagtccgttatcaacttgaaaaagtggcaccgagtcggtgcatgatcctgacgacggagaccgccgtcgtcgacaagcctactccagaggcatttt

SEQ ID NO: 541 - RNA, 147 nt, synthetic construct
  source 1..147: mol_type = other RNA
ccgcagcctctggagtagctgttttagagctagaaatagcaagttaaaataaggctagtccgttatcaacttgaaaaagtggcaccgagtcggtgcatgatcctgacgacggagaccgccgtcgtcgacaagcctactccagaggca

SEQ ID NO: 542 - RNA, 20 nt, synthetic construct
  source 1..20: mol_type = other RNA
ggagtcttgctctgtcgccc

SEQ ID NO: 543 - RNA, 17 nt, synthetic construct
  source 1..17: mol_type = other RNA
gtcttgctctgtcgccc

SEQ ID NO: 544 - RNA, 18 nt, synthetic construct
  source 1..18: mol_type = other RNA
agtcttgctctgtcgccc

SEQ ID NO: 545 - RNA, 19 nt, synthetic construct
  source 1..19: mol_type = other RNA
gagtcttgctctgtcgccc

SEQ ID NO: 546 - RNA, 21 nt, synthetic construct
  source 1..21: mol_type = other RNA
cggagtcttgctctgtcgccc

SEQ ID NO: 547 - RNA, 22 nt, synthetic construct
  source 1..22: mol_type = other RNA
acggagtcttgctctgtcgccc

SEQ ID NO: 548-552 - skipped (5 entries)

SEQ ID NO: 553 - RNA, 10 nt, synthetic construct
  source 1..10: mol_type = other RNA
cgacagagca

SEQ ID NO: 554 - RNA, 11 nt, synthetic construct
  source 1..11: mol_type = other RNA
cgacagagcaa

SEQ ID NO: 555 - RNA, 12 nt, synthetic construct
  source 1..12: mol_type = other RNA
cgacagagcaag

SEQ ID NO: 556 - RNA, 13 nt, synthetic construct
  source 1..13: mol_type = other RNA
cgacagagcaaga

SEQ ID NO: 557 - RNA, 14 nt, synthetic construct
  source 1..14: mol_type = other RNA
cgacagagcaagac

SEQ ID NO: 558 - RNA, 15 nt, synthetic construct
  source 1..15: mol_type = other RNA
cgacagagcaagact

SEQ ID NO: 559 - RNA, 16 nt, synthetic construct
  source 1..16: mol_type = other RNA
cgacagagcaagactc

SEQ ID NO: 560 - RNA, 17 nt, synthetic construct
  source 1..17: mol_type = other RNA
cgacagagcaagactcc

SEQ ID NO: 561 - RNA, 18 nt, synthetic construct
  source 1..18: mol_type = other RNA
cgacagagcaagactccg

SEQ ID NO: 562 - RNA, 19 nt, synthetic construct
  source 1..19: mol_type = other RNA
cgacagagcaagactccgt

SEQ ID NO: 563 - RNA, 144 nt, synthetic construct
  source 1..144: mol_type = other RNA
ggagtcttgctctgtcgcccgttttagagctagaaatagcaagttaaaataaggctagtccgttatcaacttgaaaaagtggcaccgagtcggtgcatgatcctgacgacggagaccgccgtcgtcgacaagcccgacagagca

SEQ ID NO: 564 - RNA, 151 nt, synthetic construct
  source 1..151: mol_type = other RNA
ggagtcttgctctgtcgcccgttttagagctagaaatagcaagttaaaataaggctagtccgttatcaacttgaaaaagtggcaccgagtcggtgcatgatcctgacgacggagaccgccgtcgtcgacaagcccgacagagcattttttt

SEQ ID NO: 565 - RNA, 146 nt, synthetic construct
  source 1..146: mol_type = other RNA
ggagtcttgctctgtcgcccgttttagagctagaaatagcaagttaaaataaggctagtccgttatcaacttgaaaaagtggcaccgagtcggtgcatgatcctgacgacggagaccgccgtcgtcgacaagcccgacagagcaag

SEQ ID NO: 566 - RNA, 153 nt, synthetic construct
  source 1..153: mol_type = other RNA
ggagtcttgctctgtcgcccgttttagagctagaaatagcaagttaaaataaggctagtccgttatcaacttgaaaaagtggcaccgagtcggtgcatgatcctgacgacggagaccgccgtcgtcgacaagcccgacagagcaagttttttt

SEQ ID NO: 567 - RNA, 146 nt, synthetic construct
  source 1..146: mol_type = other RNA
ggagtcttgctctgtcgcccgttttagagctagaaatagcaagttaaaataaggctagtccgttatcaacttgaaaaagtggcaccgagtcggtgcatgatcctgacgacggagaccgccgtcgtcgacaagcccgacagagtttt

SEQ ID NO: 568 - RNA, 142 nt, synthetic construct
  source 1..142: mol_type = other RNA
ggagtcttgctctgtcgcccgttttagagctagaaatagcaagttaaaataaggctagtccgttatcaacttgaaaaagtggcaccgagtcggtgcatgatcctgacgacggagaccgccgtcgtcgacaagcccgacagag

SEQ ID NO: 569 - RNA, 148 nt, synthetic construct
  source 1..148: mol_type = other RNA
ggagtcttgctctgtcgcccgttttagagctagaaatagcaagttaaaataaggctagtccgttatcaacttgaaaaagtggcaccgagtcggtgcatgatcctgacgacggagaccgccgtcgtcgacaagcccgacagagcatttt

SEQ ID NO: 570 - RNA, 150 nt, synthetic construct
  source 1..150: mol_type = other RNA
ggagtcttgctctgtcgcccgttttagagctagaaatagcaagttaaaataaggctagtccgttatcaacttgaaaaagtggcaccgagtcggtgcatgatcctgacgacggagaccgccgtcgtcgacaagcccgacagagcaagtttt

SEQ ID NO: 571 - RNA, 20 nt, synthetic construct
  source 1..20: mol_type = other RNA
aggagatctaaggaccatca

SEQ ID NO: 572 - RNA, 17 nt, synthetic construct
  source 1..17: mol_type = other RNA
agatctaaggaccatca

SEQ ID NO: 573 - RNA, 18 nt, synthetic construct
  source 1..18: mol_type = other RNA
gagatctaaggaccatca

SEQ ID NO: 574 - RNA, 19 nt, synthetic construct
  source 1..19: mol_type = other RNA
ggagatctaaggaccatca

SEQ ID NO: 575 - RNA, 21 nt, synthetic construct
  source 1..21: mol_type = other RNA
gaggagatctaaggaccatca

SEQ ID NO: 576 - RNA, 22 nt, synthetic construct
  source 1..22: mol_type = other RNA
agaggagatctaaggaccatca

SEQ ID NO: 577-581 - skipped (5 entries)

SEQ ID NO: 582 - RNA, 10 nt, synthetic construct
  source 1..10: mol_type = other RNA
tggtccttag

SEQ ID NO: 583 - RNA, 11 nt, synthetic construct
  source 1..11: mol_type = other RNA
tggtccttaga

SEQ ID NO: 584 - RNA, 12 nt, synthetic construct
  source 1..12: mol_type = other RNA
tggtccttagat

SEQ ID NO: 585 - RNA, 13 nt, synthetic construct
  source 1..13: mol_type = other RNA
tggtccttagatc

SEQ ID NO: 586 - RNA, 14 nt, synthetic construct
  source 1..14: mol_type = other RNA
tggtccttagatct

SEQ ID NO: 587 - RNA, 15 nt, synthetic construct
  source 1..15: mol_type = other RNA
tggtccttagatctc

SEQ ID NO: 588 - RNA, 16 nt, synthetic construct
  source 1..16: mol_type = other RNA
tggtccttagatctcc

SEQ ID NO: 589 - RNA, 17 nt, synthetic construct
  source 1..17: mol_type = other RNA
tggtccttagatctcct

SEQ ID NO: 590 - RNA, 18 nt, synthetic construct
  source 1..18: mol_type = other RNA
tggtccttagatctcctc

SEQ ID NO: 591 - RNA, 19 nt, synthetic construct
  source 1..19: mol_type = other RNA
tggtccttagatctcctct

SEQ ID NO: 592 - RNA, 144 nt, synthetic construct
  source 1..144: mol_type = other RNA
aggagatctaaggaccatcagttttagagctagaaatagcaagttaaaataaggctagtccgttatcaacttgaaaaagtggcaccgagtcggtgcatgatcctgacgacggagaccgccgtcgtcgacaagcctggtccttag

SEQ ID NO: 593 - RNA, 152 nt, synthetic construct
  source 1..152: mol_type = other RNA
gaggagatctaaggaccatcagttttagagctagaaatagcaagttaaaataaggctagtccgttatcaacttgaaaaagtggcaccgagtcggtgcatgatcctgacgacggagaccgccgtcgtcgacaagcctggtccttagttttttt

SEQ ID NO: 594 - RNA, 146 nt, synthetic construct
  source 1..146: mol_type = other RNA
aggagatctaaggaccatcagttttagagctagaaatagcaagttaaaataaggctagtccgttatcaacttgaaaaagtggcaccgagtcggtgcatgatcctgacgacggagaccgccgtcgtcgacaagcctggtccttagat

SEQ ID NO: 595 - RNA, 154 nt, synthetic construct
  source 1..154: mol_type = other RNA
gaggagatctaaggaccatcagttttagagctagaaatagcaagttaaaataaggctagtccgttatcaacttgaaaaagtggcaccgagtcggtgcatgatcctgacgacggagaccgccgtcgtcgacaagcctggtccttagatttttttt

SEQ ID NO: 596 - RNA, 146 nt, synthetic construct
  source 1..146: mol_type = other RNA
aggagatctaaggaccatcagttttagagctagaaatagcaagttaaaataaggctagtccgttatcaacttgaaaaagtggcaccgagtcggtgcatgatcctgacgacggagaccgccgtcgtcgacaagcctggtcctttttt

SEQ ID NO: 597 - RNA, 142 nt, synthetic construct
  source 1..142: mol_type = other RNA
aggagatctaaggaccatcagttttagagctagaaatagcaagttaaaataaggctagtccgttatcaacttgaaaaagtggcaccgagtcggtgcatgatcctgacgacggagaccgccgtcgtcgacaagcctggtcctt

SEQ ID NO: 598 - RNA, 148 nt, synthetic construct
  source 1..148: mol_type = other RNA
aggagatctaaggaccatcagttttagagctagaaatagcaagttaaaataaggctagtccgttatcaacttgaaaaagtggcaccgagtcggtgcatgatcctgacgacggagaccgccgtcgtcgacaagcctggtccttagtttt

SEQ ID NO: 599 - RNA, 150 nt, synthetic construct
  source 1..150: mol_type = other RNA
aggagatctaaggaccatcagttttagagctagaaatagcaagttaaaataaggctagtccgttatcaacttgaaaaagtggcaccgagtcggtgcatgatcctgacgacggagaccgccgtcgtcgacaagcctggtccttagattttt

SEQ ID NO: 600 - RNA, 20 nt, synthetic construct
  source 1..20: mol_type = other RNA
ataaatgtctgctttcctag

SEQ ID NO: 601 - RNA, 17 nt, synthetic construct
  source 1..17: mol_type = other RNA
aatgtctgctttcctag

SEQ ID NO: 602 - RNA, 18 nt, synthetic construct
  source 1..18: mol_type = other RNA
aaatgtctgctttcctag

SEQ ID NO: 603 - RNA, 19 nt, synthetic construct
  source 1..19: mol_type = other RNA
taaatgtctgctttcctag

SEQ ID NO: 604 - RNA, 21 nt, synthetic construct
  source 1..21: mol_type = other RNA
aataaatgtctgctttcctag

SEQ ID NO: 605 - RNA, 22 nt, synthetic construct
  source 1..22: mol_type = other RNA
taataaatgtctgctttcctag

SEQ ID NO: 606-610 - skipped (5 entries)

SEQ ID NO: 611 - RNA, 10 nt, synthetic construct
  source 1..10: mol_type = other RNA
ggaaagcaga

SEQ ID NO: 612 - RNA, 11 nt, synthetic construct
  source 1..11: mol_type = other RNA
ggaaagcagac

SEQ ID NO: 613 - RNA, 12 nt, synthetic construct
  source 1..12: mol_type = other RNA
ggaaagcagaca

SEQ ID NO: 614 - RNA, 13 nt, synthetic construct
  source 1..13: mol_type = other RNA
ggaaagcagacat

SEQ ID NO: 615 - RNA, 14 nt, synthetic construct
  source 1..14: mol_type = other RNA
ggaaagcagacatt

SEQ ID NO: 616 - RNA, 15 nt, synthetic construct
  source 1..15: mol_type = other RNA
ggaaagcagacattt

SEQ ID NO: 617 - RNA, 16 nt, synthetic construct
  source 1..16: mol_type = other RNA
ggaaagcagacattta

SEQ ID NO: 618 - RNA, 17 nt, synthetic construct
  source 1..17: mol_type = other RNA
ggaaagcagacatttat

SEQ ID NO: 619 - RNA, 18 nt, synthetic construct
  source 1..18: mol_type = other RNA
ggaaagcagacatttatt

SEQ ID NO: 620 - RNA, 19 nt, synthetic construct
  source 1..19: mol_type = other RNA
ggaaagcagacatttatta

SEQ ID NO: 621 - RNA, 144 nt, synthetic construct
  source 1..144: mol_type = other RNA
ataaatgtctgctttcctaggttttagagctagaaatagcaagttaaaataaggctagtccgttatcaacttgaaaaagtggcaccgagtcggtgcatgatcctgacgacggagaccgccgtcgtcgacaagccggaaagcaga

SEQ ID NO: 622 - RNA, 152 nt, synthetic construct
  source 1..152: mol_type = other RNA
gataaatgtctgctttcctaggttttagagctagaaatagcaagttaaaataaggctagtccgttatcaacttgaaaaagtggcaccgagtcggtgcatgatcctgacgacggagaccgccgtcgtcgacaagccggaaagcagattttttt

SEQ ID NO: 623 - RNA, 146 nt, synthetic construct
  source 1..146: mol_type = other RNA
ataaatgtctgctttcctaggttttagagctagaaatagcaagttaaaataaggctagtccgttatcaacttgaaaaagtggcaccgagtcggtgcatgatcctgacgacggagaccgccgtcgtcgacaagccggaaagcagaca

SEQ ID NO: 624 - RNA, 155 nt, synthetic construct
  source 1..155: mol_type = other RNA
gataaatgtctgctttcctaggttttagagctagaaatagcaagttaaaataaggctagtccgttatcaacttgaaaaagtggcaccgagtcggtgcatgatcctgacgacggagaccgccgtcgtcgacaagccggaaagcagacaattttttt

SEQ ID NO: 625 - skipped

SEQ ID NO: 626 - RNA, 146 nt, synthetic construct
  source 1..146: mol_type = other RNA
ataaatgtctgctttcctaggttttagagctagaaatagcaagttaaaataaggctagtccgttatcaacttgaaaaagtggcaccgagtcggtgcatgatcctgacgacggagaccgccgtcgtcgacaagccggaaagcatttt

SEQ ID NO: 627 - RNA, 142 nt, synthetic construct
  source 1..142: mol_type = other RNA
ataaatgtctgctttcctaggttttagagctagaaatagcaagttaaaataaggctagtccgttatcaacttgaaaaagtggcaccgagtcggtgcatgatcctgacgacggagaccgccgtcgtcgacaagccggaaagca

SEQ ID NO: 628 - RNA, 148 nt, synthetic construct
  source 1..148: mol_type = other RNA
ataaatgtctgctttcctaggttttagagctagaaatagcaagttaaaataaggctagtccgttatcaacttgaaaaagtggcaccgagtcggtgcatgatcctgacgacggagaccgccgtcgtcgacaagccggaaagcagatttt

SEQ ID NO: 629 - RNA, 151 nt, synthetic construct
  source 1..151: mol_type = other RNA
ataaatgtctgctttcctaggttttagagctagaaatagcaagttaaaataaggctagtccgttatcaacttgaaaaagtggcaccgagtcggtgcatgatcctgacgacggagaccgccgtcgtcgacaagccggaaagcagacaatttt

SEQ ID NO: 630 - RNA, 147 nt, synthetic construct
  source 1..147: mol_type = other RNA
ataaatgtctgctttcctaggttttagagctagaaatagcaagttaaaataaggctagtccgttatcaacttgaaaaagtggcaccgagtcggtgcatgatcctgacgacggagaccgccgtcgtcgacaagccggaaagcagacaa

SEQ ID NO: 631 - RNA, 20 nt, synthetic construct
  source 1..20: mol_type = other RNA
actctgctgatggccagacg

SEQ ID NO: 632 - RNA, 17 nt, synthetic construct
  source 1..17: mol_type = other RNA
ctgctgatggccagacg

SEQ ID NO: 633 - RNA, 18 nt, synthetic construct
  source 1..18: mol_type = other RNA
tctgctgatggccagacg

SEQ ID NO: 634 - RNA, 19 nt, synthetic construct
  source 1..19: mol_type = other RNA
ctctgctgatggccagacg

SEQ ID NO: 635 - RNA, 21 nt, synthetic construct
  source 1..21: mol_type = other RNA
aactctgctgatggccagacg

SEQ ID NO: 636 - RNA, 22 nt, synthetic construct
  source 1..22: mol_type = other RNA
aaactctgctgatggccagacg

SEQ ID NO: 637-641 - skipped (5 entries)

SEQ ID NO: 642 - RNA, 10 nt, synthetic construct
  source 1..10: mol_type = other RNA
ctggccatca

SEQ ID NO: 643 - RNA, 11 nt, synthetic construct
  source 1..11: mol_type = other RNA
ctggccatcag

SEQ ID NO: 644 - RNA, 12 nt, synthetic construct
  source 1..12: mol_type = other RNA
ctggccatcagc

SEQ ID NO: 645 - RNA, 13 nt, synthetic construct
  source 1..13: mol_type = other RNA
ctggccatcagca

SEQ ID NO: 646 - RNA, 14 nt, synthetic construct
  source 1..14: mol_type = other RNA
ctggccatcagcag

SEQ ID NO: 647 - RNA, 15 nt, synthetic construct
  source 1..15: mol_type = other RNA
ctggccatcagcaga

SEQ ID NO: 648 - RNA, 16 nt, synthetic construct
  source 1..16: mol_type = other RNA
ctggccatcagcagag

SEQ ID NO: 649 - RNA, 17 nt, synthetic construct
  source 1..17: mol_type = other RNA
ctggccatcagcagagt

SEQ ID NO: 650 - RNA, 18 nt, synthetic construct
  source 1..18: mol_type = other RNA
ctggccatcagcagagtt

SEQ ID NO: 651 - RNA, 19 nt, synthetic construct
  source 1..19: mol_type = other RNA
ctggccatcagcagagttt

SEQ ID NO: 652 - RNA, 146 nt, synthetic construct
  source 1..146: mol_type = other RNA
actctgctgatggccagacggttttagagctagaaatagcaagttaaaataaggctagtccgttatcaacttgaaaaagtggcaccgagtcggtgcatgatcctgacgacggagaccgccgtcgtcgacaagccctggccatcagc

SEQ ID NO: 653 - RNA, 154 nt, synthetic construct
  source 1..154: mol_type = other RNA
gactctgctgatggccagacggttttagagctagaaatagcaagttaaaataaggctagtccgttatcaacttgaaaaagtggcaccgagtcggtgcatgatcctgacgacggagaccgccgtcgtcgacaagccctggccatcagcttttttt

SEQ ID NO: 654 - RNA, 144 nt, synthetic construct
  source 1..144: mol_type = other RNA
actctgctgatggccagacggttttagagctagaaatagcaagttaaaataaggctagtccgttatcaacttgaaaaagtggcaccgagtcggtgcatgatcctgacgacggagaccgccgtcgtcgacaagccctggccatca

SEQ ID NO: 655 - RNA, 152 nt, synthetic construct
  source 1..152: mol_type = other RNA
gactctgctgatggccagacggttttagagctagaaatagcaagttaaaataaggctagtccgttatcaacttgaaaaagtggcaccgagtcggtgcatgatcctgacgacggagaccgccgtcgtcgacaagccctggccatcattttttt

SEQ ID NO: 656 - RNA, 124 nt, synthetic construct
  source 1..124: mol_type = other RNA
actctgctgatggccagacggttttagagctagaaatagcaagttaaaataaggctagtccgttatcaacttgaaaaagtggcaccgagtcggtgcaaagtctcatttgacttactggccatca

SEQ ID NO: 657 - RNA, 132 nt, synthetic construct
  source 1..132: mol_type = other RNA
gactctgctgatggccagacggttttagagctagaaatagcaagttaaaataaggctagtccgttatcaacttgaaaaagtggcaccgagtcggtgcaaagtctcatttgacttactggccatcattttttt

SEQ ID NO: 658 - RNA, 124 nt, synthetic construct
  source 1..124: mol_type = other RNA
actctgctgatggccagacggttttagagctagaaatagcaagttaaaataaggctagtccgttatcaacttgaaaaagtggcaccgagtcggtgcaggcaggatcttgaaattctggccatca

SEQ ID NO: 659 - RNA, 132 nt, synthetic construct
  source 1..132: mol_type = other RNA
gactctgctgatggccagacggttttagagctagaaatagcaagttaaaataaggctagtccgttatcaacttgaaaaagtggcaccgagtcggtgcaggcaggatcttgaaattctggccatcattttttt

SEQ ID NO: 660 - RNA, 124 nt, synthetic construct
  source 1..124: mol_type = other RNA
actctgctgatggccagacggttttagagctagaaatagcaagttaaaataaggctagtccgttatcaacttgaaaaagtggcaccgagtcggtgcgtacatggcagagagcaactggccatca

SEQ ID NO: 661 - RNA, 132 nt, synthetic construct
  source 1..132: mol_type = other RNA
gactctgctgatggccagacggttttagagctagaaatagcaagttaaaataaggctagtccgttatcaacttgaaaaagtggcaccgagtcggtgcgtacatggcagagagcaactggccatcattttttt

SEQ ID NO: 662 - RNA, 121 nt, synthetic construct
  source 1..121: mol_type = other RNA
actctgctgatggccagacggttttagagctagaaatagcaagttaaaataaggctagtccgttatcaacttgaaaaagtggcaccgagtcggtgcagaacggccaaaggtctggccatca

SEQ ID NO: 663 - RNA, 129 nt, synthetic construct
  source 1..129: mol_type = other RNA
gactctgctgatggccagacggttttagagctagaaatagcaagttaaaataaggctagtccgttatcaacttgaaaaagtggcaccgagtcggtgcagaacggccaaaggtctggccatcattttttt

SEQ ID NO: 664 - RNA, 124 nt, synthetic construct
  source 1..124: mol_type = other RNA
actctgctgatggccagacggttttagagctagaaatagcaagttaaaataaggctagtccgttatcaacttgaaaaagtggcaccgagtcggtgcacccaagaggagggcagactggccatca

SEQ ID NO: 665 - RNA, 132 nt, synthetic construct
  source 1..132: mol_type = other RNA
gactctgctgatggccagacggttttagagctagaaatagcaagttaaaataaggctagtccgttatcaacttgaaaaagtggcaccgagtcggtgcacccaagaggagggcagactggccatcattttttt

SEQ ID NO: 666 - RNA, 121 nt, synthetic construct
  source 1..121: mol_type = other RNA
actctgctgatggccagacggttttagagctagaaatagcaagttaaaataaggctagtccgttatcaacttgaaaaagtggcaccgagtcggtgcggacggcccgtacatctggccatca

SEQ ID NO: 667 - RNA, 129 nt, synthetic construct
  source 1..129: mol_type = other RNA
gactctgctgatggccagacggttttagagctagaaatagcaagttaaaataaggctagtccgttatcaacttgaaaaagtggcaccgagtcggtgcggacggcccgtacatctggccatcattttttt

SEQ ID NO: 668 - RNA, 124 nt, synthetic construct
  source 1..124: mol_type = other RNA
actctgctgatggccagacggttttagagctagaaatagcaagttaaaataaggctagtccgttatcaacttgaaaaagtggcaccgagtcggtgcaggcctggcgtccaggccctggccatca

SEQ ID NO: 669 - RNA, 132 nt, synthetic construct
  source 1..132: mol_type = other RNA
gactctgctgatggccagacggttttagagctagaaatagcaagttaaaataaggctagtccgttatcaacttgaaaaagtggcaccgagtcggtgcaggcctggcgtccaggccctggccatcattttttt

SEQ ID NO: 670 - RNA, 121 nt, synthetic construct
  source 1..121: mol_type = other RNA
actctgctgatggccagacggttttagagctagaaatagcaagttaaaataaggctagtccgttatcaacttgaaaaagtggcaccgagtcggtgcagccgccgtgcggcactggccatca

SEQ ID NO: 671 - RNA, 129 nt, synthetic construct
  source 1..129: mol_type = other RNA
gactctgctgatggccagacggttttagagctagaaatagcaagttaaaataaggctagtccgttatcaacttgaaaaagtggcaccgagtcggtgcagccgccgtgcggcactggccatcattttttt

SEQ ID NO: 672 - RNA, 128 nt, synthetic construct
  source 1..128: mol_type = other RNA
actctgctgatggccagacggttttagagctagaaatagcaagttaaaataaggctagtccgttatcaacttgaaaaagtggcaccgagtcggtgctcatacacagagcaaactccaactggccatca

SEQ ID NO: 673 - RNA, 136 nt, synthetic construct
  source 1..136: mol_type = other RNA
gactctgctgatggccagacggttttagagctagaaatagcaagttaaaataaggctagtccgttatcaacttgaaaaagtggcaccgagtcggtgctcatacacagagcaaactccaactggccatcattttttt

SEQ ID NO: 674 - RNA, 126 nt, synthetic construct
  source 1..126: mol_type = other RNA
actctgctgatggccagacggttttagagctagaaatagcaagttaaaataaggctagtccgttatcaacttgaaaaagtggcaccgagtcggtgcacagcaccatctagtgtaaactggccatca

SEQ ID NO: 675 - RNA, 134 nt, synthetic construct
  source 1..134: mol_type = other RNA
gactctgctgatggccagacggttttagagctagaaatagcaagttaaaataaggctagtccgttatcaacttgaaaaagtggcaccgagtcggtgcacagcaccatctagtgtaaactggccatcattttttt

SEQ ID NO: 676 - RNA, 126 nt, synthetic construct
  source 1..126: mol_type = other RNA
actctgctgatggccagacggttttagagctagaaatagcaagttaaaataaggctagtccgttatcaacttgaaaaagtggcaccgagtcggtgcctcgtcactggatgtgaagtctggccatca

SEQ ID NO: 677 - RNA, 134 nt, synthetic construct
  source 1..134: mol_type = other RNA
gactctgctgatggccagacggttttagagctagaaatagcaagttaaaataaggctagtccgttatcaacttgaaaaagtggcaccgagtcggtgcctcgtcactggatgtgaagtctggccatcattttttt

SEQ ID NO: 678 - RNA, 128 nt, synthetic construct
  source 1..128: mol_type = other RNA
actctgctgatggccagacggttttagagctagaaatagcaagttaaaataaggctagtccgttatcaacttgaaaaagtggcaccgagtcggtgcttgatgtcgtaggtgataccgcctggccatca

SEQ ID NO: 679 - RNA, 136 nt, synthetic construct
  source 1..136: mol_type = other RNA
gactctgctgatggccagacggttttagagctagaaatagcaagttaaaataaggctagtccgttatcaacttgaaaaagtggcaccgagtcggtgcttgatgtcgtaggtgataccgcctggccatcattttttt

SEQ ID NO: 680 - RNA, 126 nt, synthetic construct
  source 1..126: mol_type = other RNA
actctgctgatggccagacggttttagagctagaaatagcaagttaaaataaggctagtccgttatcaacttgaaaaagtggcaccgagtcggtgcggatcgtccctcaggggcagctggccatca

SEQ ID NO: 681 - RNA, 134 nt, synthetic construct
  source 1..134: mol_type = other RNA
gactctgctgatggccagacggttttagagctagaaatagcaagttaaaataaggctagtccgttatcaacttgaaaaagtggcaccgagtcggtgcggatcgtccctcaggggcagctggccatcattttttt

SEQ ID NO: 682 - RNA, 129 nt, synthetic construct
  source 1..129: mol_type = other RNA
actctgctgatggccagacggttttagagctagaaatagcaagttaaaataaggctagtccgttatcaacttgaaaaagtggcaccgagtcggtgctcgtggtctcgggcatcagacccctggccatca

SEQ ID NO: 683 - RNA, 137 nt, synthetic construct
  source 1..137: mol_type = other RNA
gactctgctgatggccagacggttttagagctagaaatagcaagttaaaataaggctagtccgttatcaacttgaaaaagtggcaccgagtcggtgctcgtggtctcgggcatcagacccctggccatcattttttt

SEQ ID NO: 684 - RNA, 126 nt, synthetic construct
  source 1..126: mol_type = other RNA
actctgctgatggccagacggttttagagctagaaatagcaagttaaaataaggctagtccgttatcaacttgaaaaagtggcaccgagtcggtgcccgcactcggcccgtggggcctggccatca

SEQ ID NO: 685 - RNA, 134 nt, synthetic construct
  source 1..134: mol_type = other RNA
gactctgctgatggccagacggttttagagctagaaatagcaagttaaaataaggctagtccgttatcaacttgaaaaagtggcaccgagtcggtgcccgcactcggcccgtggggcctggccatcattttttt

SEQ ID NO: 686 - RNA, 136 nt, synthetic construct
  source 1..136: mol_type = other RNA
actctgctgatggccagacggttttagagctagaaatagcaagttaaaataaggctagtccgttatcaacttgaaaaagtggcaccgagtcggtgcgatttgataatctcgtatatagagcagttactggccatca

SEQ ID NO: 687 - RNA, 144 nt, synthetic construct
  source 1..144: mol_type = other RNA
gactctgctgatggccagacggttttagagctagaaatagcaagttaaaataaggctagtccgttatcaacttgaaaaagtggcaccgagtcggtgcgatttgataatctcgtatatagagcagttactggccatcattttttt

SEQ ID NO: 688 - RNA, 136 nt, synthetic construct
  source 1..136: mol_type = other RNA
actctgctgatggccagacggttttagagctagaaatagcaagttaaaataaggctagtccgttatcaacttgaaaaagtggcaccgagtcggtgcgtgtctcatgtttccttgtattacgttaccctggccatca

SEQ ID NO: 689 - RNA, 144 nt, synthetic construct
  source 1..144: mol_type = other RNA
gactctgctgatggccagacggttttagagctagaaatagcaagttaaaataaggctagtccgttatcaacttgaaaaagtggcaccgagtcggtgcgtgtctcatgtttccttgtattacgttaccctggccatcattttttt

SEQ ID NO: 690 - RNA, 136 nt, synthetic construct
  source 1..136: mol_type = other RNA
actctgctgatggccagacggttttagagctagaaatagcaagttaaaataaggctagtccgttatcaacttgaaaaagtggcaccgagtcggtgcgtaatccaagctcactaggggcacaacttgctggccatca

SEQ ID NO: 691 - RNA, 144 nt, synthetic construct
  source 1..144: mol_type = other RNA
gactctgctgatggccagacggttttagagctagaaatagcaagttaaaataaggctagtccgttatcaacttgaaaaagtggcaccgagtcggtgcgtaatccaagctcactaggggcacaacttgctggccatcattttttt

SEQ ID NO: 692 - RNA, 136 nt, synthetic construct
  source 1..136: mol_type = other RNA
actctgctgatggccagacggttttagagctagaaatagcaagttaaaataaggctagtccgttatcaacttgaaaaagtggcaccgagtcggtgcctatcatgcatggcgatcccaggttcgcgcctggccatca

SEQ ID NO: 693 - RNA, 144 nt, synthetic construct
  source 1..144: mol_type = other RNA
gactctgctgatggccagacggttttagagctagaaatagcaagttaaaataaggctagtccgttatcaacttgaaaaagtggcaccgagtcggtgcctatcatgcatggcgatcccaggttcgcgcctggccatcattttttt

SEQ ID NO: 694 - RNA, 144 nt, synthetic construct
  source 1..144: mol_type = other RNA
actctgctgatggccagacggttttagagctagaaatagcaagttaaaataaggctagtccgttatcaacttgaaaaagtggcaccgagtcggtgcggcttgtcgacgacggcggtctccgtcgtcaggatcatctggccatca

SEQ ID NO: 695 - RNA, 152 nt, synthetic construct
  source 1..152: mol_type = other RNA
gactctgctgatggccagacggttttagagctagaaatagcaagttaaaataaggctagtccgttatcaacttgaaaaagtggcaccgagtcggtgcggcttgtcgacgacggcggtctccgtcgtcaggatcatctggccatcattttttt

SEQ ID NO: 696 - RNA, 127 nt, synthetic construct
  source 1..127: mol_type = other RNA
actctgctgatggccagacggttttagagctagaaatagcaagttaaaataaggctagtccgttatcaacttgaaaaagtggcaccgagtcggtgcaaatatctgacccagttacgctggccatcag

SEQ ID NO: 697 - RNA, 135 nt, synthetic construct
  source 1..135: mol_type = other RNA
gactctgctgatggccagacggttttagagctagaaatagcaagttaaaataaggctagtccgttatcaacttgaaaaagtggcaccgagtcggtgcaaatatctgacccagttacgctggccatcagttttttt

SEQ ID NO: 698 - RNA, 129 nt, synthetic construct
  source 1..129: mol_type = other RNA
actctgctgatggccagacggttttagagctagaaatagcaagttaaaataaggctagtccgttatcaacttgaaaaagtggcaccgagtcggtgcaaatatctgacccagttacgctggccatcagca

SEQ ID NO: 699 - RNA, 137 nt, synthetic construct
  source 1..137: mol_type = other RNA
gactctgctgatggccagacggttttagagctagaaatagcaagttaaaataaggctagtccgttatcaacttgaaaaagtggcaccgagtcggtgcaaatatctgacccagttacgctggccatcagcattttttt

SEQ ID NO: 700 - RNA, 132 nt, synthetic construct
  source 1..132: mol_type = other RNA
actctgctgatggccagacggttttagagctagaaatagcaagttaaaataaggctagtccgttatcaacttgaaaaagtggcaccgagtcggtgccaaagaaatatctgacccagttacgctggccatcag

SEQ ID NO: 701 - RNA, 140 nt, synthetic construct
  source 1..140: mol_type = other RNA
gactctgctgatggccagacggttttagagctagaaatagcaagttaaaataaggctagtccgttatcaacttgaaaaagtggcaccgagtcggtgccaaagaaatatctgacccagttacgctggccatcagttttttt

SEQ ID NO: 702 - RNA, 134 nt, synthetic construct
  source 1..134: mol_type = other RNA
actctgctgatggccagacggttttagagctagaaatagcaagttaaaataaggctagtccgttatcaacttgaaaaagtggcaccgagtcggtgccaaagaaatatctgacccagttacgctggccatcagca

SEQ ID NO: 703 - RNA, 142 nt, synthetic construct
  source 1..142: mol_type = other RNA
gactctgctgatggccagacggttttagagctagaaatagcaagttaaaataaggctagtccgttatcaacttgaaaaagtggcaccgagtcggtgccaaagaaatatctgacccagttacgctggccatcagcattttttt

SEQ ID NO: 704 - RNA, 137 nt, synthetic construct
  source 1..137: mol_type = other RNA
actctgctgatggccagacggttttagagctagaaatagcaagttaaaataaggctagtccgttatcaacttgaaaaagtggcaccgagtcggtgcgggtacaaagaaatatctgacccagttacgctggccatcag

SEQ ID NO: 705 - RNA, 145 nt, synthetic construct
  source 1..145: mol_type = other RNA
gactctgctgatggccagacggttttagagctagaaatagcaagttaaaataaggctagtccgttatcaacttgaaaaagtggcaccgagtcggtgcgggtacaaagaaatatctgacccagttacgctggccatcagttttttt

SEQ ID NO: 706 - RNA, 139 nt, synthetic construct
  source 1..139: mol_type = other RNA
actctgctgatggccagacggttttagagctagaaatagcaagttaaaataaggctagtccgttatcaacttgaaaaagtggcaccgagtcggtgcgggtacaaagaaatatctgacccagttacgctggccatcagca

SEQ ID NO: 707 - RNA, 147 nt, synthetic construct
  source 1..147: mol_type = other RNA
gactctgctgatggccagacggttttagagctagaaatagcaagttaaaataaggctagtccgttatcaacttgaaaaagtggcaccgagtcggtgcgggtacaaagaaatatctgacccagttacgctggccatcagcattttttt

SEQ ID NO: 708 - RNA, 142 nt, synthetic construct
  source 1..142: mol_type = other RNA
actctgctgatggccagacggttttagagctagaaatagcaagttaaaataaggctagtccgttatcaacttgaaaaagtggcaccgagtcggtgcatgatcctgacgacggagaccgccgtcgtcgacaagccctggccat

SEQ ID NO: 709 - RNA, 150 nt, synthetic construct
  source 1..150: mol_type = other RNA
gactctgctgatggccagacggttttagagctagaaatagcaagttaaaataaggctagtccgttatcaacttgaaaaagtggcaccgagtcggtgcatgatcctgacgacggagaccgccgtcgtcgacaagccctggccatttttttt

SEQ ID NO: 710 - RNA, 143 nt, synthetic construct
  source 1..143: mol_type = other RNA
actctgctgatggccagacggttttagagctagaaatagcaagttaaaataaggctagtccgttatcaacttgaaaaagtggcaccgagtcggtgcatgatcctgacgacggagaccgccgtcgtcgacaagccctggccatc

SEQ ID NO: 711 - RNA, 151 nt, synthetic construct
  source 1..151: mol_type = other RNA
gactctgctgatggccagacggttttagagctagaaatagcaagttaaaataaggctagtccgttatcaacttgaaaaagtggcaccgagtcggtgcatgatcctgacgacggagaccgccgtcgtcgacaagccctggccatcttttttt

SEQ ID NO: 712 - RNA, 145 nt, synthetic construct
  source 1..145: mol_type = other RNA
actctgctgatggccagacggttttagagctagaaatagcaagttaaaataaggctagtccgttatcaacttgaaaaagtggcaccgagtcggtgcatgatcctgacgacggagaccgccgtcgtcgacaagccctggccatcag

SEQ ID NO: 713 - RNA, 153 nt, synthetic construct
  source 1..153: mol_type = other RNA
gactctgctgatggccagacggttttagagctagaaatagcaagttaaaataaggctagtccgttatcaacttgaaaaagtggcaccgagtcggtgcatgatcctgacgacggagaccgccgtcgtcgacaagccctggccatcagttttttt

SEQ ID NO: 714 - RNA, 147 nt, synthetic construct
  source 1..147: mol_type = other RNA
actctgctgatggccagacggttttagagctagaaatagcaagttaaaataaggctagtccgttatcaacttgaaaaagtggcaccgagtcggtgcatgatcctgacgacggagaccgccgtcgtcgacaagccctggccatcagca

SEQ ID NO: 715 - RNA, 155 nt, synthetic construct
  source 1..155: mol_type = other RNA
gactctgctgatggccagacggttttagagctagaaatagcaagttaaaataaggctagtccgttatcaacttgaaaaagtggcaccgagtcggtgcatgatcctgacgacggagaccgccgtcgtcgacaagccctggccatcagcattttttt

SEQ ID NO: 716 - RNA, 148 nt, synthetic construct
  source 1..148: mol_type = other RNA
actctgctgatggccagacggttttagagctagaaatagcaagttaaaataaggctagtccgttatcaacttgaaaaagtggcaccgagtcggtgcatgatcctgacgacggagaccgccgtcgtcgacaagccctggccatcagcag

SEQ ID NO: 717 - RNA, 156 nt, synthetic construct
  source 1..156: mol_type = other RNA
gactctgctgatggccagacggttttagagctagaaatagcaagttaaaataaggctagtccgttatcaacttgaaaaagtggcaccgagtcggtgcatgatcctgacgacggagaccgccgtcgtcgacaagccctggccatcagcagttttttt

SEQ ID NO: 718 - RNA, 149 nt, synthetic construct
  source 1..149: mol_type = other RNA
actctgctgatggccagacggttttagagctagaaatagcaagttaaaataaggctagtccgttatcaacttgaaaaagtggcaccgagtcggtgcatgatcctgacgacggagaccgccgtcgtcgacaagccctggccatcagcaga

SEQ ID NO: 719 - RNA, 157 nt, synthetic construct
  source 1..157: mol_type = other RNA
gactctgctgatggccagacggttttagagctagaaatagcaagttaaaataaggctagtccgttatcaacttgaaaaagtggcaccgagtcggtgcatgatcctgacgacggagaccgccgtcgtcgacaagccctggccatcagcagattttttt

SEQ ID NO: 720 - RNA, 150 nt, synthetic construct
  source 1..150: mol_type = other RNA
actctgctgatggccagacggttttagagctagaaatagcaagttaaaataaggctagtccgttatcaacttgaaaaagtggcaccgagtcggtgcatgatcctgacgacggagaccgccgtcgtcgacaagccctggccatcagcagag

SEQ ID NO: 721 - RNA, 158 nt, synthetic construct
  source 1..158: mol_type = other RNA
gactctgctgatggccagacggttttagagctagaaatagcaagttaaaataaggctagtccgttatcaacttgaaaaagtggcaccgagtcggtgcatgatcctgacgacggagaccgccgtcgtcgacaagccctggccatcagcagagttttttt

SEQ ID NO: 722 - RNA, 151 nt, synthetic construct
  source 1..151: mol_type = other RNA
actctgctgatggccagacggttttagagctagaaatagcaagttaaaataaggctagtccgttatcaacttgaaaaagtggcaccgagtcggtgcatgatcctgacgacggagaccgccgtcgtcgacaagccctggccatcagcagagt

SEQ ID NO: 723 - RNA, 159 nt, synthetic construct
  source 1..159: mol_type = other RNA
gactctgctgatggccagacggttttagagctagaaatagcaagttaaaataaggctagtccgttatcaacttgaaaaagtggcaccgagtcggtgcatgatcctgacgacggagaccgccgtcgtcgacaagccctggccatcagcagagtttttttt

SEQ ID NO: 724 - RNA, 146 nt, synthetic construct
  source 1..146: mol_type = other RNA
actctgctgatggccagacggtttaagagcggggaaatccgcaagtttaaataaggctagtccgttatcagcgtgaaaacgcggcaccgagtcggtgcatgatcctgacgacggagaccgccgtcgtcgacaagccctggccatca

SEQ ID NO: 725 - RNA, 154 nt, synthetic construct
  source 1..154: mol_type = other RNA
gactctgctgatggccagacggtttaagagcggggaaatccgcaagtttaaataaggctagtccgttatcagcgtgaaaacgcggcaccgagtcggtgcatgatcctgacgacggagaccgccgtcgtcgacaagccctggccatcattttttt

SEQ ID NO: 726 - RNA, 187 nt, synthetic construct
  source 1..187: mol_type = other RNA
actctgctgatggccagacggttttagagctagaaatagcaagttaaaataaggctagtccgttatcaacttgaaaaagtggcaccgagtcggtgcatgatcctgacgacggagaccgccgtcgtcgacaagccctggccatcactcactcgcggttctatctagttacgcgttaaaccaactagaa

SEQ ID NO: 727 - RNA, 195 nt, synthetic construct
  source 1..195: mol_type = other RNA
gactctgctgatggccagacggttttagagctagaaatagcaagttaaaataaggctagtccgttatcaacttgaaaaagtggcaccgagtcggtgcatgatcctgacgacggagaccgccgtcgtcgacaagccctggccatcactcactcgcggttctatctagttacgcgttaaaccaactagaattttttt

SEQ ID NO: 728 - RNA, 187 nt, synthetic construct
  source 1..187: mol_type = other RNA
actctgctgatggccagacggttttagagctagaaatagcaagttaaaataaggctagtccgttatcaacttgaaaaagtggcaccgagtcggtgcatgatcctgacgacggagaccgccgtcgtcgacaagccctggccatcactcacacgcggttctatctagttacgcgttaaaccaactagaa

SEQ ID NO: 729 - RNA, 195 nt, synthetic construct
  source 1..195: mol_type = other RNA
gactctgctgatggccagacggttttagagctagaaatagcaagttaaaataaggctagtccgttatcaacttgaaaaagtggcaccgagtcggtgcatgatcctgacgacggagaccgccgtcgtcgacaagccctggccatcactcacacgcggttctatctagttacgcgttaaaccaactagaattttttt

SEQ ID NO: 730 - RNA, 189 nt, synthetic construct
  source 1..189: mol_type = other RNA
actctgctgatggccagacggtttaagagcggggaaatccgcaagtttaaataaggctagtccgttatcagcgtgaaaacgcggcaccgagtcggtgcatgatcctgacgacggagaccgccgtcgtcgacaagccctggccatcactcactcgcggttctatctagttacgcgttaaaccaactagaa

SEQ ID NO: 731 - RNA, 197 nt, synthetic construct
  source 1..197: mol_type = other RNA
gactctgctgatggccagacggtttaagagcggggaaatccgcaagtttaaataaggctagtccgttatcagcgtgaaaacgcggcaccgagtcggtgcatgatcctgacgacggagaccgccgtcgtcgacaagccctggccatcactcactcgcggttctatctagttacgcgttaaaccaactagaattttttt

SEQ ID NO: 732 - RNA, 189 nt, synthetic construct
  source 1..189: mol_type = other RNA
actctgctgatggccagacggtttaagagcggggaaatccgcaagtttaaataaggctagtccgttatcagcgtgaaaacgcggcaccgagtcggtgcatgatcctgacgacggagaccgccgtcgtcgacaagccctggccatcactcacacgcggttctatctagttacgcgttaaaccaactagaa

SEQ ID NO: 733 - RNA, 197 nt, synthetic construct
  source 1..197: mol_type = other RNA
gactctgctgatggccagacggtttaagagcggggaaatccgcaagtttaaataaggctagtccgttatcagcgtgaaaacgcggcaccgagtcggtgcatgatcctgacgacggagaccgccgtcgtcgacaagccctggccatcactcacacgcggttctatctagttacgcgttaaaccaactagaattttttt

SEQ ID NO: 734 - RNA, 146 nt, synthetic construct
  source 1..146: mol_type = other RNA
actctgctgatggccagacggtataagagcggggaaatccgcaagtttatataagactagttcgttatcagcgtgaaaacgcggcaccgagtcggtgcatgatcctgacgacggagaccgccgtcgtcgacaagccctggccatca

SEQ ID NO: 735 - RNA, 154 nt, synthetic construct
  source 1..154: mol_type = other RNA
gactctgctgatggccagacggtataagagcggggaaatccgcaagtttatataagactagttcgttatcagcgtgaaaacgcggcaccgagtcggtgcatgatcctgacgacggagaccgccgtcgtcgacaagccctggccatcattttttt

SEQ ID NO: 736 - RNA, 146 nt, synthetic construct
  source 1..146: mol_type = other RNA
actctgctgatggccagacggtataagagcggggaaatccgcatgtttatataagactagttcgttctcagcgtgaaaacgcggcaccgagtcggtgcatgatcctgacgacggagaccgccgtcgtcgacaagccctggccatca

SEQ ID NO: 737 - RNA, 154 nt, synthetic construct
  source 1..154: mol_type = other RNA
gactctgctgatggccagacggtataagagcggggaaatccgcatgtttatataagactagttcgttctcagcgtgaaaacgcggcaccgagtcggtgcatgatcctgacgacggagaccgccgtcgtcgacaagccctggccatcattttttt

SEQ ID NO: 738 - RNA, 150 nt, synthetic construct
  source 1..150: mol_type = other RNA
actctgctgatggccagacggttttagagctagaaatagcaagttaaaataaggctagtccgttatcaacttgaaaaagtggcaccgagtcggtgcatgatcctgacgacggagaccgccgtcgtcgacaagccctggccatcagctttt

SEQ ID NO: 739 - RNA, 148 nt, synthetic construct
  source 1..148: mol_type = other RNA
actctgctgatggccagacggttttagagctagaaatagcaagttaaaataaggctagtccgttatcaacttgaaaaagtggcaccgagtcggtgcatgatcctgacgacggagaccgccgtcgtcgacaagccctggccatcatttt

SEQ ID NO: 740 - RNA, 20 nt, synthetic construct
  source 1..20: mol_type = other RNA
cccagtgtccacctcctggg

SEQ ID NO: 741 - RNA, 17 nt, synthetic construct
  source 1..17: mol_type = other RNA
agtgtccacctcctggg

SEQ ID NO: 742 - RNA, 18 nt, synthetic construct
  source 1..18: mol_type = other RNA
cagtgtccacctcctggg

SEQ ID NO: 743 - RNA, 19 nt, synthetic construct
  source 1..19: mol_type = other RNA
ccagtgtccacctcctggg

SEQ ID NO: 744 - RNA, 21 nt, synthetic construct
  source 1..21: mol_type = other RNA
acccagtgtccacctcctggg

SEQ ID NO: 745 - RNA, 22 nt, synthetic construct
  source 1..22: mol_type = other RNA
aacccagtgtccacctcctggg

SEQ ID NO: 746-750 - skipped (5 entries)

SEQ ID NO: 751 - RNA, 10 nt, synthetic construct
  source 1..10: mol_type = other RNA
aggaggtgga

SEQ ID NO: 752 - RNA, 11 nt, synthetic construct
  source 1..11: mol_type = other RNA
aggaggtggac

SEQ ID NO: 753 - RNA, 12 nt, synthetic construct
  source 1..12: mol_type = other RNA
aggaggtggaca

SEQ ID NO: 754 - RNA, 13 nt, synthetic construct
  source 1..13: mol_type = other RNA
aggaggtggacac

SEQ ID NO: 755 - RNA, 14 nt, synthetic construct
  source 1..14: mol_type = other RNA
aggaggtggacact

SEQ ID NO: 756 - RNA, 15 nt, synthetic construct
  source 1..15: mol_type = other RNA
aggaggtggacactg

SEQ ID NO: 757 - RNA, 16 nt, synthetic construct
  source 1..16: mol_type = other RNA
aggaggtggacactgg

SEQ ID NO: 758 - RNA, 17 nt, synthetic construct
  source 1..17: mol_type = other RNA
aggaggtggacactggg

SEQ ID NO: 759 - RNA, 18 nt, synthetic construct
  source 1..18: mol_type = other RNA
aggaggtggacactgggt

SEQ ID NO: 760 - RNA, 19 nt, synthetic construct
  source 1..19: mol_type = other RNA
aggaggtggacactgggtt

SEQ ID NO: 761 - RNA, 146 nt, synthetic construct
  source 1..146: mol_type = other RNA
cccagtgtccacctcctggggttttagagctagaaatagcaagttaaaataaggctagtccgttatcaacttgaaaaagtggcaccgagtcggtgcatgatcctgacgacggagaccgccgtcgtcgacaagccaggaggtggaca

SEQ ID NO: 762 - RNA, 154 nt, synthetic construct
  source 1..154: mol_type = other RNA
gcccagtgtccacctcctggggttttagagctagaaatagcaagttaaaataaggctagtccgttatcaacttgaaaaagtggcaccgagtcggtgcatgatcctgacgacggagaccgccgtcgtcgacaagccaggaggtggacattttttt

SEQ ID NO: 763 - RNA, 144 nt, synthetic construct
  source 1..144: mol_type = other RNA
cccagtgtccacctcctggggttttagagctagaaatagcaagttaaaataaggctagtccgttatcaacttgaaaaagtggcaccgagtcggtgcatgatcctgacgacggagaccgccgtcgtcgacaagccaggaggtgga

SEQ ID NO: 764 - RNA, 152 nt, synthetic construct
  source 1..152: mol_type = other RNA
gcccagtgtccacctcctggggttttagagctagaaatagcaagttaaaataaggctagtccgttatcaacttgaaaaagtggcaccgagtcggtgcatgatcctgacgacggagaccgccgtcgtcgacaagccaggaggtggattttttt

SEQ ID NO: 765 - RNA, 150 nt, synthetic construct
  source 1..150: mol_type = other RNA
cccagtgtccacctcctggggttttagagctagaaatagcaagttaaaataaggctagtccgttatcaacttgaaaaagtggcaccgagtcggtgcatgatcctgacgacggagaccgccgtcgtcgacaagccaggaggtggacatttt

SEQ ID NO: 766 - RNA, 148 nt, synthetic construct
  source 1..148: mol_type = other RNA
cccagtgtccacctcctggggttttagagctagaaatagcaagttaaaataaggctagtccgttatcaacttgaaaaagtggcaccgagtcggtgcatgatcctgacgacggagaccgccgtcgtcgacaagccaggaggtggatttt

SEQ ID NO: 767 - RNA, 20 nt, synthetic construct
  source 1..20: mol_type = other RNA
gatgaattttggagaccagg

SEQ ID NO: 768 - RNA, 17 nt, synthetic construct
  source 1..17: mol_type = other RNA
gaattttggagaccagg

SEQ ID NO: 769 - RNA, 18 nt, synthetic construct
  source 1..18: mol_type = other RNA
tgaattttggagaccagg

SEQ ID NO: 770 - RNA, 19 nt, synthetic construct
  source 1..19: mol_type = other RNA
atgaattttggagaccagg

SEQ ID NO: 771 - RNA, 21 nt, synthetic construct
  source 1..21: mol_type = other RNA
tgatgaattttggagaccagg

SEQ ID NO: 772 - RNA, 22 nt, synthetic construct
  source 1..22: mol_type = other RNA
ctgatgaattttggagaccagg

SEQ ID NO: 773-777 - skipped (5 entries)

SEQ ID NO: 778 - RNA, 10 nt, synthetic construct
  source 1..10: mol_type = other RNA
ggtctccaaa

SEQ ID NO: 779 - RNA, 11 nt, synthetic construct
  source 1..11: mol_type = other RNA
ggtctccaaaa

SEQ ID NO: 780 - RNA, 12 nt, synthetic construct
  source 1..12: mol_type = other RNA
ggtctccaaaat

SEQ ID NO: 781 - RNA, 13 nt, synthetic construct
  source 1..13: mol_type = other RNA
ggtctccaaaatt

SEQ ID NO: 782 - RNA, 14 nt, synthetic construct
  source 1..14: mol_type = other RNA
ggtctccaaaattc

SEQ ID NO: 783 - RNA, 15 nt, synthetic construct
  source 1..15: mol_type = other RNA
ggtctccaaaattca

SEQ ID NO: 784 - RNA, 16 nt, synthetic construct
  source 1..16: mol_type = other RNA
ggtctccaaaattcat

SEQ ID NO: 785 - RNA, 17 nt, synthetic construct
  source 1..17: mol_type = other RNA
ggtctccaaaattcatc

SEQ ID NO: 786 - RNA, 18 nt, synthetic construct
  source 1..18: mol_type = other RNA
ggtctccaaaattcatca

SEQ ID NO: 787 - RNA, 19 nt, synthetic construct
  source 1..19: mol_type = other RNA
ggtctccaaaattcatcag

SEQ ID NO: 788 - RNA, 146 nt, synthetic construct
  source 1..146: mol_type = other RNA
gatgaattttggagaccagggttttagagctagaaatagcaagttaaaataaggctagtccgttatcaacttgaaaaagtggcaccgagtcggtgcatgatcctgacgacggagaccgccgtcgtcgacaagccggtctccaaaat

SEQ ID NO: 789 - RNA, 154 nt, synthetic construct
  source 1..154: mol_type = other RNA
gatgaattttggagaccagggttttagagctagaaatagcaagttaaaataaggctagtccgttatcaacttgaaaaagtggcaccgagtcggtgcatgatcctgacgacggagaccgccgtcgtcgacaagccggtctccaaaatattttttt

SEQ ID NO: 790 - RNA, 144 nt, synthetic construct
  source 1..144: mol_type = other RNA
gatgaattttggagaccagggttttagagctagaaatagcaagttaaaataaggctagtccgttatcaacttgaaaaagtggcaccgagtcggtgcatgatcctgacgacggagaccgccgtcgtcgacaagccggtctccaaa

SEQ ID NO: 791 - RNA, 151 nt, synthetic construct
  source 1..151: mol_type = other RNA
gatgaattttggagaccagggttttagagctagaaatagcaagttaaaataaggctagtccgttatcaacttgaaaaagtggcaccgagtcggtgcatgatcctgacgacggagaccgccgtcgtcgacaagccggtctccaaattttttt

SEQ ID NO: 792 - skipped

SEQ ID NO: 793 - RNA, 151 nt, synthetic construct
  source 1..151: mol_type = other RNA
gatgaattttggagaccagggttttagagctagaaatagcaagttaaaataaggctagtccgttatcaacttgaaaaagtggcaccgagtcggtgcatgatcctgacgacggagaccgccgtcgtcgacaagccggtctccaaaatatttt

SEQ ID NO: 794 - RNA, 147 nt, synthetic construct
  source 1..147: mol_type = other RNA
gatgaattttggagaccagggttttagagctagaaatagcaagttaaaataaggctagtccgttatcaacttgaaaaagtggcaccgagtcggtgcatgatcctgacgacggagaccgccgtcgtcgacaagccggtctccaaaata

SEQ ID NO: 795 - RNA, 148 nt, synthetic construct
  source 1..148: mol_type = other RNA
gatgaattttggagaccagggttttagagctagaaatagcaagttaaaataaggctagtccgttatcaacttgaaaaagtggcaccgagtcggtgcatgatcctgacgacggagaccgccgtcgtcgacaagccggtctccaaatttt

SEQ ID NO: 796 - RNA, 20 nt, synthetic construct
  source 1..20: mol_type = other RNA
gctagtttttagtagagatg

SEQ ID NO: 797 - RNA, 17 nt, synthetic construct
  source 1..17: mol_type = other RNA
agtttttagtagagatg

SEQ ID NO: 798 - RNA, 18 nt, synthetic construct
  source 1..18: mol_type = other RNA
tagtttttagtagagatg

SEQ ID NO: 799 - RNA, 19 nt, synthetic construct
  source 1..19: mol_type = other RNA
ctagtttttagtagagatg

SEQ ID NO: 800 - RNA, 21 nt, synthetic construct
  source 1..21: mol_type = other RNA
agctagtttttagtagagatg

SEQ ID NO: 801 - RNA, 22 nt, synthetic construct
  source 1..22: mol_type = other RNA
gagctagtttttagtagagatg

SEQ ID NO: 802-806 - skipped (5 entries)

SEQ ID NO: 807 - RNA, 10 nt, synthetic construct
  source 1..10: mol_type = other RNA
ctctactaaa

SEQ ID NO: 808 - RNA, 11 nt, synthetic construct
  source 1..11: mol_type = other RNA
ctctactaaaa

SEQ ID NO: 809 - RNA, 12 nt, synthetic construct
  source 1..12: mol_type = other RNA
ctctactaaaaa

SEQ ID NO: 810 - RNA, 13 nt, synthetic construct
  source 1..13: mol_type = other RNA
ctctactaaaaac

SEQ ID NO: 811 - RNA, 14 nt, synthetic construct
  source 1..14: mol_type = other RNA
ctctactaaaaact

SEQ ID NO: 812 - RNA, 15 nt, synthetic construct
  source 1..15: mol_type = other RNA
ctctactaaaaacta

SEQ ID NO: 813 - RNA, 16 nt, synthetic construct
  source 1..16: mol_type = other RNA
ctctactaaaaactag

SEQ ID NO: 814 - RNA, 17 nt, synthetic construct
  source 1..17: mol_type = other RNA
ctctactaaaaactagc

SEQ ID NO: 815 - RNA, 18 nt, synthetic construct
  source 1..18: mol_type = other RNA
ctctactaaaaactagct

SEQ ID NO: 816 - RNA, 19 nt, synthetic construct
  source 1..19: mol_type = other RNA
ctctactaaaaactagctc

SEQ ID NO: 817 - RNA, 146 nt, synthetic construct
  source 1..146: mol_type = other RNA
gctagtttttagtagagatggttttagagctagaaatagcaagttaaaataaggctagtccgttatcaacttgaaaaagtggcaccgagtcggtgcatgatcctgacgacggagaccgccgtcgtcgacaagccctctactaaaaa

SEQ ID NO: 818 - RNA, 153 nt, synthetic construct
  source 1..153: mol_type = other RNA
gctagtttttagtagagatggttttagagctagaaatagcaagttaaaataaggctagtccgttatcaacttgaaaaagtggcaccgagtcggtgcatgatcctgacgacggagaccgccgtcgtcgacaagccctctactaaaaattttttt

SEQ ID NO: 819 - RNA, 144 nt, synthetic construct
  source 1..144: mol_type = other RNA
gctagtttttagtagagatggttttagagctagaaatagcaagttaaaataaggctagtccgttatcaacttgaaaaagtggcaccgagtcggtgcatgatcctgacgacggagaccgccgtcgtcgacaagccctctactaaa

SEQ ID NO: 820 - RNA, 151 nt, synthetic construct
  source 1..151: mol_type = other RNA
gctagtttttagtagagatggttttagagctagaaatagcaagttaaaataaggctagtccgttatcaacttgaaaaagtggcaccgagtcggtgcatgatcctgacgacggagaccgccgtcgtcgacaagccctctactaaattttttt

SEQ ID NO: 821 - RNA, 150 nt, synthetic construct
  source 1..150: mol_type = other RNA
gctagtttttagtagagatggttttagagctagaaatagcaagttaaaataaggctagtccgttatcaacttgaaaaagtggcaccgagtcggtgcatgatcctgacgacggagaccgccgtcgtcgacaagccctctactaaaaatttt

SEQ ID NO: 822 - RNA, 148 nt, synthetic construct
  source 1..148: mol_type = other RNA
gctagtttttagtagagatggttttagagctagaaatagcaagttaaaataaggctagtccgttatcaacttgaaaaagtggcaccgagtcggtgcatgatcctgacgacggagaccgccgtcgtcgacaagccctctactaaatttt

SEQ ID NO: 823 - RNA, 20 nt, synthetic construct
  source 1..20: mol_type = other RNA
tgagcaaccacacccagcct

SEQ ID NO: 824 - RNA, 17 nt, synthetic construct
  source 1..17: mol_type = other RNA
gcaaccacacccagcct

SEQ ID NO: 825 - RNA, 18 nt, synthetic construct
  source 1..18: mol_type = other RNA
agcaaccacacccagcct

SEQ ID NO: 826 - RNA, 19 nt, synthetic construct
  source 1..19: mol_type = other RNA
gagcaaccacacccagcct

SEQ ID NO: 827 - RNA, 21 nt, synthetic construct
  source 1..21: mol_type = other RNA
gtgagcaaccacacccagcct

SEQ ID NO: 828 - RNA, 22 nt, synthetic construct
  source 1..22: mol_type = other RNA
tgtgagcaaccacacccagcct

SEQ ID NO: 829-833 - skipped (5 entries)

SEQ ID NO: 834 - RNA, 10 nt, synthetic construct
  source 1..10: mol_type = other RNA
ctgggtgtgg

SEQ ID NO: 835 - RNA, 11 nt, synthetic construct
  source 1..11: mol_type = other RNA
ctgggtgtggt

SEQ ID NO: 836 - RNA, 12 nt, synthetic construct
  source 1..12: mol_type = other RNA
ctgggtgtggtt

SEQ ID NO: 837 - RNA, 13 nt, synthetic construct
  source 1..13: mol_type = other RNA
ctgggtgtggttg

SEQ ID NO: 838 - RNA, 14 nt, synthetic construct
  source 1..14: mol_type = other RNA
ctgggtgtggttgc

SEQ ID NO: 839 - RNA, 15 nt, synthetic construct
  source 1..15: mol_type = other RNA
ctgggtgtggttgct

SEQ ID NO: 840 - RNA, 16 nt, synthetic construct
  source 1..16: mol_type = other RNA
ctgggtgtggttgctc

SEQ ID NO: 841 - RNA, 17 nt, synthetic construct
  source 1..17: mol_type = other RNA
ctgggtgtggttgctca

SEQ ID NO: 842 - RNA, 18 nt, synthetic construct
  source 1..18: mol_type = other RNA
ctgggtgtggttgctcac

SEQ ID NO: 843 - RNA, 19 nt, synthetic construct
  source 1..19: mol_type = other RNA
ctgggtgtggttgctcaca

SEQ ID NO: 844 - RNA, 146 nt, synthetic construct
  source 1..146: mol_type = other RNA
tgagcaaccacacccagcctgttttagagctagaaatagcaagttaaaataaggctagtccgttatcaacttgaaaaagtggcaccgagtcggtgcatgatcctgacgacggagaccgccgtcgtcgacaagccctgggtgtggtt

SEQ ID NO: 845 - RNA, 154 nt, synthetic construct
  source 1..154: mol_type = other RNA
gtgagcaaccacacccagcctgttttagagctagaaatagcaagttaaaataaggctagtccgttatcaacttgaaaaagtggcaccgagtcggtgcatgatcctgacgacggagaccgccgtcgtcgacaagccctgggtgtggttttttttt

SEQ ID NO: 846 - RNA, 144 nt, synthetic construct
  source 1..144: mol_type = other RNA
tgagcaaccacacccagcctgttttagagctagaaatagcaagttaaaataaggctagtccgttatcaacttgaaaaagtggcaccgagtcggtgcatgatcctgacgacggagaccgccgtcgtcgacaagccctgggtgtgg

SEQ ID NO: 847 - RNA, 153 nt, synthetic construct
  source 1..153: mol_type = other RNA
gtgagcaaccacacccagcctgttttagagctagaaatagcaagttaaaataaggctagtccgttatcaacttgaaaaagtggcaccgagtcggtgcatgatcctgacgacggagaccgccgtcgtcgacaagccctgggtgtggattttttt

SEQ ID NO: 848 - skipped

SEQ ID NO: 849 - RNA, 150 nt, synthetic construct
  source 1..150: mol_type = other RNA
tgagcaaccacacccagcctgttttagagctagaaatagcaagttaaaataaggctagtccgttatcaacttgaaaaagtggcaccgagtcggtgcatgatcctgacgacggagaccgccgtcgtcgacaagccctgggtgtggtttttt

SEQ ID NO: 850 - RNA, 149 nt, synthetic construct
  source 1..149: mol_type = other RNA
tgagcaaccacacccagcctgttttagagctagaaatagcaagttaaaataaggctagtccgttatcaacttgaaaaagtggcaccgagtcggtgcatgatcctgacgacggagaccgccgtcgtcgacaagccctgggtgtggatttt

SEQ ID NO: 851 - RNA, 145 nt, synthetic construct
  source 1..145: mol_type = other RNA
tgagcaaccacacccagcctgttttagagctagaaatagcaagttaaaataaggctagtccgttatcaacttgaaaaagtggcaccgagtcggtgcatgatcctgacgacggagaccgccgtcgtcgacaagccctgggtgtgga

SEQ ID NO: 852 - RNA, 20 nt, synthetic construct
  source 1..20: mol_type = other RNA
actaaatatgctgtcccatg

SEQ ID NO: 853 - RNA, 17 nt, synthetic construct
  source 1..17: mol_type = other RNA
aaatatgctgtcccatg

SEQ ID NO: 854 - RNA, 18 nt, synthetic construct
  source 1..18: mol_type = other RNA
taaatatgctgtcccatg

SEQ ID NO: 855 - RNA, 19 nt, synthetic construct
  source 1..19: mol_type = other RNA
ctaaatatgctgtcccatg

SEQ ID NO: 856 - RNA, 21 nt, synthetic construct
  source 1..21: mol_type = other RNA
tactaaatatgctgtcccatg

SEQ ID NO: 857 - RNA, 22 nt, synthetic construct
  source 1..22: mol_type = other RNA
gtactaaatatgctgtcccatg

SEQ ID NO: 858-862 - skipped (5 entries)

SEQ ID NO: 863 - RNA, 10 nt, synthetic construct
  source 1..10: mol_type = other RNA
gggacagcat

SEQ ID NO: 864 - RNA, 11 nt, synthetic construct
  source 1..11: mol_type = other RNA
gggacagcata

SEQ ID NO: 865 - RNA, 12 nt, synthetic construct
  source 1..12: mol_type = other RNA
gggacagcatat

SEQ ID NO: 866 - RNA, 13 nt, synthetic construct
  source 1..13: mol_type = other RNA
gggacagcatatt

SEQ ID NO: 867 - RNA, 14 nt, synthetic construct
  source 1..14: mol_type = other RNA
gggacagcatattt

SEQ ID NO: 868 - RNA, 15 nt, synthetic construct
  source 1..15: mol_type = other RNA
gggacagcatattta

SEQ ID NO: 869 - RNA, 16 nt, synthetic construct
  source 1..16: mol_type = other RNA
gggacagcatatttag

SEQ ID NO: 870 - RNA, 17 nt, synthetic construct
  source 1..17: mol_type = other RNA
gggacagcatatttagt

SEQ ID NO: 871 - RNA, 18 nt, synthetic construct
  source 1..18: mol_type = other RNA
gggacagcatatttagta

SEQ ID NO: 872 - RNA, 19 nt, synthetic construct
  source 1..19: mol_type = other RNA
gggacagcatatttagtac

SEQ ID NO: 873 - RNA, 146 nt, synthetic construct
  source 1..146: mol_type = other RNA
actaaatatgctgtcccatggttttagagctagaaatagcaagttaaaataaggctagtccgttatcaacttgaaaaagtggcaccgagtcggtgcatgatcctgacgacggagaccgccgtcgtcgacaagccgggacagcatat

SEQ ID NO: 874 - RNA, 155 nt, synthetic construct
  source 1..155: mol_type = other RNA
gactaaatatgctgtcccatggttttagagctagaaatagcaagttaaaataaggctagtccgttatcaacttgaaaaagtggcaccgagtcggtgcatgatcctgacgacggagaccgccgtcgtcgacaagccgggacagcatatattttttt

SEQ ID NO: 875 - RNA, 144 nt, synthetic construct
  source 1..144: mol_type = other RNA
actaaatatgctgtcccatggttttagagctagaaatagcaagttaaaataaggctagtccgttatcaacttgaaaaagtggcaccgagtcggtgcatgatcctgacgacggagaccgccgtcgtcgacaagccgggacagcat

SEQ ID NO: 876 - RNA, 152 nt, synthetic construct
  source 1..152: mol_type = other RNA
gactaaatatgctgtcccatggttttagagctagaaatagcaagttaaaataaggctagtccgttatcaacttgaaaaagtggcaccgagtcggtgcatgatcctgacgacggagaccgccgtcgtcgacaagccgggacagcatttttttt

SEQ ID NO: 877 - skipped

SEQ ID NO: 878 - RNA, 151 nt, synthetic construct
  source 1..151: mol_type = other RNA
actaaatatgctgtcccatggttttagagctagaaatagcaagttaaaataaggctagtccgttatcaacttgaaaaagtggcaccgagtcggtgcatgatcctgacgacggagaccgccgtcgtcgacaagccgggacagcatatatttt

SEQ ID NO: 879 - RNA, 147 nt, synthetic construct
  source 1..147: mol_type = other RNA
actaaatatgctgtcccatggttttagagctagaaatagcaagttaaaataaggctagtccgttatcaacttgaaaaagtggcaccgagtcggtgcatgatcctgacgacggagaccgccgtcgtcgacaagccgggacagcatata

SEQ ID NO: 880 - RNA, 148 nt, synthetic construct
  source 1..148: mol_type = other RNA
actaaatatgctgtcccatggttttagagctagaaatagcaagttaaaataaggctagtccgttatcaacttgaaaaagtggcaccgagtcggtgcatgatcctgacgacggagaccgccgtcgtcgacaagccgggacagcattttt

SEQ ID NO: 881 - RNA, 20 nt, synthetic construct
  source 1..20: mol_type = other RNA
aaaaaacataggctgcctcg

SEQ ID NO: 882 - RNA, 17 nt, synthetic construct
  source 1..17: mol_type = other RNA
aaacataggctgcctcg

SEQ ID NO: 883 - RNA, 18 nt, synthetic construct
  source 1..18: mol_type = other RNA
aaaacataggctgcctcg

SEQ ID NO: 884 - RNA, 19 nt, synthetic construct
  source 1..19: mol_type = other RNA
aaaaacataggctgcctcg

SEQ ID NO: 885 - RNA, 21 nt, synthetic construct
  source 1..21: mol_type = other RNA
caaaaaacataggctgcctcg

SEQ ID NO: 886 - RNA, 22 nt, synthetic construct
  source 1..22: mol_type = other RNA
tcaaaaaacataggctgcctcg

SEQ ID NO: 887-891 - skipped (5 entries)

SEQ ID NO: 892 - RNA, 10 nt, synthetic construct
  source 1..10: mol_type = other RNA
ggcagcctat

SEQ ID NO: 893 - RNA, 11 nt, synthetic construct
  source 1..11: mol_type = other RNA
ggcagcctatg

SEQ ID NO: 894 - RNA, 12 nt, synthetic construct
  source 1..12: mol_type = other RNA
ggcagcctatgt

SEQ ID NO: 895 - RNA, 13 nt, synthetic construct
  source 1..13: mol_type = other RNA
ggcagcctatgtt

SEQ ID NO: 896 - RNA, 14 nt, synthetic construct
  source 1..14: mol_type = other RNA
ggcagcctatgttt

SEQ ID NO: 897 - RNA, 15 nt, synthetic construct
  source 1..15: mol_type = other RNA
ggcagcctatgtttt

SEQ ID NO: 898 - RNA, 16 nt, synthetic construct
  source 1..16: mol_type = other RNA
ggcagcctatgttttt

SEQ ID NO: 899 - RNA, 17 nt, synthetic construct
  source 1..17: mol_type = other RNA
ggcagcctatgtttttt

SEQ ID NO: 900 - RNA, 18 nt, synthetic construct
  source 1..18: mol_type = other RNA
ggcagcctatgttttttg

SEQ ID NO: 901 - RNA, 19 nt, synthetic construct
  source 1..19: mol_type = other RNA
ggcagcctatgttttttga

SEQ ID NO: 902 - RNA, 146 nt, synthetic construct
  source 1..146: mol_type = other RNA
aaaaaacataggctgcctcggttttagagctagaaatagcaagttaaaataaggctagtccgttatcaacttgaaaaagtggcaccgagtcggtgcatgatcctgacgacggagaccgccgtcgtcgacaagccggcagcctatgt

SEQ ID NO: 903 - RNA, 155 nt, synthetic construct
  source 1..155: mol_type = other RNA
gaaaaaacataggctgcctcggttttagagctagaaatagcaagttaaaataaggctagtccgttatcaacttgaaaaagtggcaccgagtcggtgcatgatcctgacgacggagaccgccgtcgtcgacaagccggcagcctatgtattttttt

SEQ ID NO: 904 - RNA, 144 nt, synthetic construct
  source 1..144: mol_type = other RNA
aaaaaacataggctgcctcggttttagagctagaaatagcaagttaaaataaggctagtccgttatcaacttgaaaaagtggcaccgagtcggtgcatgatcctgacgacggagaccgccgtcgtcgacaagccggcagcctat

SEQ ID NO: 905 - RNA, 152 nt, synthetic construct
  source 1..152: mol_type = other RNA
gaaaaaacataggctgcctcggttttagagctagaaatagcaagttaaaataaggctagtccgttatcaacttgaaaaagtggcaccgagtcggtgcatgatcctgacgacggagaccgccgtcgtcgacaagccggcagcctatttttttt

SEQ ID NO: 906 - skipped

SEQ ID NO: 907 - RNA, 151 nt, synthetic construct
  source 1..151: mol_type = other RNA
aaaaaacataggctgcctcggttttagagctagaaatagcaagttaaaataaggctagtccgttatcaacttgaaaaagtggcaccgagtcggtgcatgatcctgacgacggagaccgccgtcgtcgacaagccggcagcctatgtatttt

SEQ ID NO: 908 - RNA, 147 nt, synthetic construct
  source 1..147: mol_type = other RNA
aaaaaacataggctgcctcggttttagagctagaaatagcaagttaaaataaggctagtccgttatcaacttgaaaaagtggcaccgagtcggtgcatgatcctgacgacggagaccgccgtcgtcgacaagccggcagcctatgta

SEQ ID NO: 909 - RNA, 148 nt, synthetic construct
  source 1..148: mol_type = other RNA
aaaaaacataggctgcctcggttttagagctagaaatagcaagttaaaataaggctagtccgttatcaacttgaaaaagtggcaccgagtcggtgcatgatcctgacgacggagaccgccgtcgtcgacaagccggcagcctattttt

SEQ ID NO: 910 - RNA, 20 nt, synthetic construct
  source 1..20: mol_type = other RNA
agctgtctccggtatttaag

SEQ ID NO: 911 - RNA, 17 nt, synthetic construct
  source 1..17: mol_type = other RNA
tgtctccggtatttaag

SEQ ID NO: 912 - RNA, 18 nt, synthetic construct
  source 1..18: mol_type = other RNA
ctgtctccggtatttaag

SEQ ID NO: 913 - RNA, 19 nt, synthetic construct
  source 1..19: mol_type = other RNA
gctgtctccggtatttaag

SEQ ID NO: 914 - RNA, 21 nt, synthetic construct
  source 1..21: mol_type = other RNA
aagctgtctccggtatttaag

SEQ ID NO: 915 - RNA, 22 nt, synthetic construct
  source 1..22: mol_type = other RNA
gaagctgtctccggtatttaag

SEQ ID NO: 916-920 - skipped (5 entries)

SEQ ID NO: 921 - RNA, 10 nt, synthetic construct
  source 1..10: mol_type = other RNA
aaataccgga

SEQ ID NO: 922 - RNA, 11 nt, synthetic construct
  source 1..11: mol_type = other RNA
aaataccggag

SEQ ID NO: 923 - RNA, 12 nt, synthetic construct
  source 1..12: mol_type = other RNA
aaataccggaga

SEQ ID NO: 924 - RNA, 13 nt, synthetic construct
  source 1..13: mol_type = other RNA
aaataccggagac

SEQ ID NO: 925 - RNA, 14 nt, synthetic construct
  source 1..14: mol_type = other RNA
aaataccggagaca

SEQ ID NO: 926 - RNA, 15 nt, synthetic construct
  source 1..15: mol_type = other RNA
aaataccggagacag

SEQ ID NO: 927 - RNA, 16 nt, synthetic construct
  source 1..16: mol_type = other RNA
aaataccggagacagc

SEQ ID NO: 928 - RNA, 17 nt, synthetic construct
  source 1..17: mol_type = other RNA
aaataccggagacagct

SEQ ID NO: 929 - RNA, 18 nt, synthetic construct
  source 1..18: mol_type = other RNA
aaataccggagacagctt

SEQ ID NO: 930 - RNA, 19 nt, synthetic construct
  source 1..19: mol_type = other RNA
aaataccggagacagcttc

SEQ ID NO: 931 - RNA, 146 nt, synthetic construct
  source 1..146: mol_type = other RNA
agctgtctccggtatttaaggttttagagctagaaatagcaagttaaaataaggctagtccgttatcaacttgaaaaagtggcaccgagtcggtgcatgatcctgacgacggagaccgccgtcgtcgacaagccaaataccggaga

SEQ ID NO: 932 - RNA, 154 nt, synthetic construct
  source 1..154: mol_type = other RNA
gagctgtctccggtatttaaggttttagagctagaaatagcaagttaaaataaggctagtccgttatcaacttgaaaaagtggcaccgagtcggtgcatgatcctgacgacggagaccgccgtcgtcgacaagccaaataccggagattttttt

SEQ ID NO: 933 - RNA, 144 nt, synthetic construct
  source 1..144: mol_type = other RNA
agctgtctccggtatttaaggttttagagctagaaatagcaagttaaaataaggctagtccgttatcaacttgaaaaagtggcaccgagtcggtgcatgatcctgacgacggagaccgccgtcgtcgacaagccaaataccgga

SEQ ID NO: 934 - RNA, 152 nt, synthetic construct
  source 1..152: mol_type = other RNA
gagctgtctccggtatttaaggttttagagctagaaatagcaagttaaaataaggctagtccgttatcaacttgaaaaagtggcaccgagtcggtgcatgatcctgacgacggagaccgccgtcgtcgacaagccaaataccggattttttt

SEQ ID NO: 935 - RNA, 150 nt, synthetic construct
  source 1..150: mol_type = other RNA
agctgtctccggtatttaaggttttagagctagaaatagcaagttaaaataaggctagtccgttatcaacttgaaaaagtggcaccgagtcggtgcatgatcctgacgacggagaccgccgtcgtcgacaagccaaataccggagatttt

SEQ ID NO: 936 - RNA, 148 nt, synthetic construct
  source 1..148: mol_type = other RNA
agctgtctccggtatttaaggttttagagctagaaatagcaagttaaaataaggctagtccgttatcaacttgaaaaagtggcaccgagtcggtgcatgatcctgacgacggagaccgccgtcgtcgacaagccaaataccggatttt

SEQ ID NO: 937 - RNA, 20 nt, synthetic construct
  source 1..20: mol_type = other RNA
agaaaagaaaaagacacctg

SEQ ID NO: 938 - RNA, 17 nt, synthetic construct
  source 1..17: mol_type = other RNA
aaagaaaaagacacctg

SEQ ID NO: 939 - RNA, 18 nt, synthetic construct
  source 1..18: mol_type = other RNA
aaaagaaaaagacacctg

SEQ ID NO: 940 - RNA, 19 nt, synthetic construct
  source 1..19: mol_type = other RNA
gaaaagaaaaagacacctg

SEQ ID NO: 941 - RNA, 21 nt, synthetic construct
  source 1..21: mol_type = other RNA
aagaaaagaaaaagacacctg

SEQ ID NO: 942 - RNA, 22 nt, synthetic construct
  source 1..22: mol_type = other RNA
taagaaaagaaaaagacacctg

SEQ ID NO: 943-947 - skipped (5 entries)

SEQ ID NO: 948 - RNA, 10 nt, synthetic construct
  source 1..10: mol_type = other RNA
gtgtcttttt

SEQ ID NO: 949 - RNA, 11 nt, synthetic construct
  source 1..11: mol_type = other RNA
gtgtctttttc

SEQ ID NO: 950 - RNA, 12 nt, synthetic construct
  source 1..12: mol_type = other RNA
gtgtctttttct

SEQ ID NO: 951 - RNA, 13 nt, synthetic construct
  source 1..13: mol_type = other RNA
gtgtctttttctt

SEQ ID NO: 952 - RNA, 14 nt, synthetic construct
  source 1..14: mol_type = other RNA
gtgtctttttcttt

SEQ ID NO: 953 - RNA, 15 nt, synthetic construct
  source 1..15: mol_type = other RNA
gtgtctttttctttt

SEQ ID NO: 954 - RNA, 16 nt, synthetic construct
  source 1..16: mol_type = other RNA
gtgtctttttcttttc

SEQ ID NO: 955 - RNA, 17 nt, synthetic construct
  source 1..17: mol_type = other RNA
gtgtctttttcttttct

SEQ ID NO: 956 - RNA, 18 nt, synthetic construct
  source 1..18: mol_type = other RNA
gtgtctttttcttttctt

SEQ ID NO: 957 - RNA, 19 nt, synthetic construct
  source 1..19: mol_type = other RNA
gtgtctttttcttttctta

SEQ ID NO: 958 - RNA, 146 nt, synthetic construct
  source 1..146: mol_type = other RNA
agaaaagaaaaagacacctggttttagagctagaaatagcaagttaaaataaggctagtccgttatcaacttgaaaaagtggcaccgagtcggtgcatgatcctgacgacggagaccgccgtcgtcgacaagccgtgtctttttct

SEQ ID NO: 959 - RNA, 155 nt, synthetic construct
  source 1..155: mol_type = other RNA
gagaaaagaaaaagacacctggttttagagctagaaatagcaagttaaaataaggctagtccgttatcaacttgaaaaagtggcaccgagtcggtgcatgatcctgacgacggagaccgccgtcgtcgacaagccgtgtctttttctattttttt

SEQ ID NO: 960 - RNA, 145 nt, synthetic construct
  source 1..145: mol_type = other RNA
agaaaagaaaaagacacctggttttagagctagaaatagcaagttaaaataaggctagtccgttatcaacttgaaaaagtggcaccgagtcggtgcatgatcctgacgacggagaccgccgtcgtcgacaagccgtgtctttttc

SEQ ID NO: 961 - RNA, 153 nt, synthetic construct
  source 1..153: mol_type = other RNA
gagaaaagaaaaagacacctggttttagagctagaaatagcaagttaaaataaggctagtccgttatcaacttgaaaaagtggcaccgagtcggtgcatgatcctgacgacggagaccgccgtcgtcgacaagccgtgtctttttcttttttt

SEQ ID NO: 962 - skipped

SEQ ID NO: 963 - RNA, 151 nt, synthetic construct
  source 1..151: mol_type = other RNA
agaaaagaaaaagacacctggttttagagctagaaatagcaagttaaaataaggctagtccgttatcaacttgaaaaagtggcaccgagtcggtgcatgatcctgacgacggagaccgccgtcgtcgacaagccgtgtctttttctatttt

SEQ ID NO: 964 - RNA, 147 nt, synthetic construct
  source 1..147: mol_type = other RNA
agaaaagaaaaagacacctggttttagagctagaaatagcaagttaaaataaggctagtccgttatcaacttgaaaaagtggcaccgagtcggtgcatgatcctgacgacggagaccgccgtcgtcgacaagccgtgtctttttcta

SEQ ID NO: 965 - RNA, 149 nt, synthetic construct
  source 1..149: mol_type = other RNA
agaaaagaaaaagacacctggttttagagctagaaatagcaagttaaaataaggctagtccgttatcaacttgaaaaagtggcaccgagtcggtgcatgatcctgacgacggagaccgccgtcgtcgacaagccgtgtctttttctttt

SEQ ID NO: 966 - RNA, 20 nt, synthetic construct
  source 1..20: mol_type = other RNA
aaaggtcataggatcacagg

SEQ ID NO: 967 - RNA, 17 nt, synthetic construct
  source 1..17: mol_type = other RNA
ggtcataggatcacagg

SEQ ID NO: 968 - RNA, 18 nt, synthetic construct
  source 1..18: mol_type = other RNA
aggtcataggatcacagg

SEQ ID NO: 969 - RNA, 19 nt, synthetic construct
  source 1..19: mol_type = other RNA
aaggtcataggatcacagg

SEQ ID NO: 970 - RNA, 21 nt, synthetic construct
  source 1..21: mol_type = other RNA
aaaaggtcataggatcacagg

SEQ ID NO: 971 - RNA, 22 nt, synthetic construct
  source 1..22: mol_type = other RNA
caaaaggtcataggatcacagg

SEQ ID NO: 972-973 - skipped (2 entries)

SEQ ID NO: 974 - RNA, 10 nt, synthetic construct
  source 1..10: mol_type = other RNA
gtgatcctat

SEQ ID NO: 975 - RNA, 11 nt, synthetic construct
  source 1..11: mol_type = other RNA
gtgatcctatg

SEQ ID NO: 976 - RNA, 12 nt, synthetic construct
  source 1..12: mol_type = other RNA
gtgatcctatga

SEQ ID NO: 977 - RNA, 13 nt, synthetic construct
  source 1..13: mol_type = other RNA
gtgatcctatgac

SEQ ID NO: 978 - RNA, 14 nt, synthetic construct
  source 1..14: mol_type = other RNA
gtgatcctatgacc

SEQ ID NO: 979 - RNA, 15 nt, synthetic construct
  source 1..15: mol_type = other RNA
gtgatcctatgacct

SEQ ID NO: 980 - RNA, 16 nt, synthetic construct
  source 1..16: mol_type = other RNA
gtgatcctatgacctt

SEQ ID NO: 981 - RNA, 17 nt, synthetic construct
  source 1..17: mol_type = other RNA
gtgatcctatgaccttt

SEQ ID NO: 982 - RNA, 18 nt, synthetic construct
  source 1..18: mol_type = other RNA
gtgatcctatgacctttt

SEQ ID NO: 983 - RNA, 19 nt, synthetic construct
  source 1..19: mol_type = other RNA
gtgatcctatgaccttttg

SEQ ID NO: 984 - RNA, 146 nt, synthetic construct
  source 1..146: mol_type = other RNA
aaaggtcataggatcacagggttttagagctagaaatagcaagttaaaataaggctagtccgttatcaacttgaaaaagtggcaccgagtcggtgcatgatcctgacgacggagaccgccgtcgtcgacaagccgtgatcctatga

SEQ ID NO: 985 - RNA, 154 nt, synthetic construct
  source 1..154: mol_type = other RNA
gaaaggtcataggatcacagggttttagagctagaaatagcaagttaaaataaggctagtccgttatcaacttgaaaaagtggcaccgagtcggtgcatgatcctgacgacggagaccgccgtcgtcgacaagccgtgatcctatgattttttt

SEQ ID NO: 986 - RNA, 144 nt, synthetic construct
  source 1..144: mol_type = other RNA
aaaggtcataggatcacagggttttagagctagaaatagcaagttaaaataaggctagtccgttatcaacttgaaaaagtggcaccgagtcggtgcatgatcctgacgacggagaccgccgtcgtcgacaagccgtgatcctat

SEQ ID NO: 987 - RNA, 152 nt, synthetic construct
  source 1..152: mol_type = other RNA
gaaaggtcataggatcacagggttttagagctagaaatagcaagttaaaataaggctagtccgttatcaacttgaaaaagtggcaccgagtcggtgcatgatcctgacgacggagaccgccgtcgtcgacaagccgtgatcctatttttttt

SEQ ID NO: 988 - RNA, 150 nt, synthetic construct
  source 1..150: mol_type = other RNA
aaaggtcataggatcacagggttttagagctagaaatagcaagttaaaataaggctagtccgttatcaacttgaaaaagtggcaccgagtcggtgcatgatcctgacgacggagaccgccgtcgtcgacaagccgtgatcctatgatttt

SEQ ID NO: 989 - RNA, 148 nt, synthetic construct
  source 1..148: mol_type = other RNA
aaaggtcataggatcacagggttttagagctagaaatagcaagttaaaataaggctagtccgttatcaacttgaaaaagtggcaccgagtcggtgcatgatcctgacgacggagaccgccgtcgtcgacaagccgtgatcctattttt

SEQ ID NO: 990 - RNA, 20 nt, synthetic construct
  source 1..20: mol_type = other RNA
catacctcatcacctcccaa

SEQ ID NO: 991 - RNA, 17 nt, synthetic construct
  source 1..17: mol_type = other RNA
acctcatcacctcccaa

SEQ ID NO: 992 - RNA, 18 nt, synthetic construct
  source 1..18: mol_type = other RNA
tacctcatcacctcccaa

SEQ ID NO: 993 - RNA, 19 nt, synthetic construct
  source 1..19: mol_type = other RNA
atacctcatcacctcccaa

SEQ ID NO: 994 - RNA, 21 nt, synthetic construct
  source 1..21: mol_type = other RNA
tcatacctcatcacctcccaa

SEQ ID NO: 995 - RNA, 22 nt, synthetic construct
  source 1..22: mol_type = other RNA
ctcatacctcatcacctcccaa

SEQ ID NO: 996-1000 - skipped (5 entries)

SEQ ID NO: 1001 - RNA, 10 nt, synthetic construct
  source 1..10: mol_type = other RNA
ggaggtgatg

SEQ ID NO: 1002 - RNA, 11 nt, synthetic construct
  source 1..11: mol_type = other RNA
ggaggtgatga

SEQ ID NO: 1003 - RNA, 12 nt, synthetic construct
  source 1..12: mol_type = other RNA
ggaggtgatgag

SEQ ID NO: 1004 - RNA, 13 nt, synthetic construct
  source 1..13: mol_type = other RNA
ggaggtgatgagg

SEQ ID NO: 1005 - RNA, 14 nt, synthetic construct
  source 1..14: mol_type = other RNA
ggaggtgatgaggt

SEQ ID NO: 1006 - RNA, 15 nt, synthetic construct
  source 1..15: mol_type = other RNA
ggaggtgatgaggta

SEQ ID NO: 1007 - RNA, 16 nt, synthetic construct
  source 1..16: mol_type = other RNA
ggaggtgatgaggtat

SEQ ID NO: 1008 - RNA, 17 nt, synthetic construct
  source 1..17: mol_type = other RNA
ggaggtgatgaggtatg

SEQ ID NO: 1009 - RNA, 18 nt, synthetic construct
  source 1..18: mol_type = other RNA
ggaggtgatgaggtatga

SEQ ID NO: 1010 - RNA, 19 nt, synthetic construct
  source 1..19: mol_type = other RNA
ggaggtgatgaggtatgag

SEQ ID NO: 1011 - RNA, 146 nt, synthetic construct
  source 1..146: mol_type = other RNA
catacctcatcacctcccaagttttagagctagaaatagcaagttaaaataaggctagtccgttatcaacttgaaaaagtggcaccgagtcggtgcatgatcctgacgacggagaccgccgtcgtcgacaagccggaggtgatgag

SEQ ID NO: 1012 - RNA, 154 nt, synthetic construct
  source 1..154: mol_type = other RNA
gcatacctcatcacctcccaagttttagagctagaaatagcaagttaaaataaggctagtccgttatcaacttgaaaaagtggcaccgagtcggtgcatgatcctgacgacggagaccgccgtcgtcgacaagccggaggtgatgagttttttt

SEQ ID NO: 1013 - RNA, 144 nt, synthetic construct
  source 1..144: mol_type = other RNA
catacctcatcacctcccaagttttagagctagaaatagcaagttaaaataaggctagtccgttatcaacttgaaaaagtggcaccgagtcggtgcatgatcctgacgacggagaccgccgtcgtcgacaagccggaggtgatg

SEQ ID NO: 1014 - RNA, 152 nt, synthetic construct
  source 1..152: mol_type = other RNA
gcatacctcatcacctcccaagttttagagctagaaatagcaagttaaaataaggctagtccgttatcaacttgaaaaagtggcaccgagtcggtgcatgatcctgacgacggagaccgccgtcgtcgacaagccggaggtgatgttttttt

SEQ ID NO: 1015 - RNA, 150 nt, synthetic construct
  source 1..150: mol_type = other RNA
catacctcatcacctcccaagttttagagctagaaatagcaagttaaaataaggctagtccgttatcaacttgaaaaagtggcaccgagtcggtgcatgatcctgacgacggagaccgccgtcgtcgacaagccggaggtgatgagtttt

SEQ ID NO: 1016 - RNA, 148 nt, synthetic construct
  source 1..148: mol_type = other RNA
catacctcatcacctcccaagttttagagctagaaatagcaagttaaaataaggctagtccgttatcaacttgaaaaagtggcaccgagtcggtgcatgatcctgacgacggagaccgccgtcgtcgacaagccggaggtgatgtttt

SEQ ID NO: 1017 - RNA, 20 nt, synthetic construct
  source 1..20: mol_type = other RNA
gtgaagacaagggcctccag

SEQ ID NO: 1018 - RNA, 17 nt, synthetic construct
  source 1..17: mol_type = other RNA
aagacaagggcctccag

SEQ ID NO: 1019 - RNA, 18 nt, synthetic construct
  source 1..18: mol_type = other RNA
gaagacaagggcctccag

SEQ ID NO: 1020 - RNA, 19 nt, synthetic construct
  source 1..19: mol_type = other RNA
tgaagacaagggcctccag

SEQ ID NO: 1021 - RNA, 21 nt, synthetic construct
  source 1..21: mol_type = other RNA
ggtgaagacaagggcctccag

SEQ ID NO: 1022 - RNA, 22 nt, synthetic construct
  source 1..22: mol_type = other RNA
gggtgaagacaagggcctccag

SEQ ID NO: 1023-1027 - skipped (5 entries)

SEQ ID NO: 1028 - RNA, 10 nt, synthetic construct
  source 1..10: mol_type = other RNA
gaggcccttg

SEQ ID NO: 1029 - RNA, 11 nt, synthetic construct
  source 1..11: mol_type = other RNA
gaggcccttgt

SEQ ID NO: 1030 - RNA, 12 nt, synthetic construct
  source 1..12: mol_type = other RNA
gaggcccttgtc

SEQ ID NO: 1031 - RNA, 13 nt, synthetic construct
  source 1..13: mol_type = other RNA
gaggcccttgtct

SEQ ID NO: 1032 - RNA, 14 nt, synthetic construct
  source 1..14: mol_type = other RNA
gaggcccttgtctt

SEQ ID NO: 1033 - RNA, 15 nt, synthetic construct
  source 1..15: mol_type = other RNA
gaggcccttgtcttc

SEQ ID NO: 1034 - RNA, 16 nt, synthetic construct
  source 1..16: mol_type = other RNA
gaggcccttgtcttca

SEQ ID NO: 1035 - RNA, 17 nt, synthetic construct
  source 1..17: mol_type = other RNA
gaggcccttgtcttcac

SEQ ID NO: 1036 - RNA, 18 nt, synthetic construct
  source 1..18: mol_type = other RNA
gaggcccttgtcttcacc

SEQ ID NO: 1037 - RNA, 19 nt, synthetic construct
  source 1..19: mol_type = other RNA
gaggcccttgtcttcaccc

SEQ ID NO: 1038 - RNA, 146 nt, synthetic construct
  source 1..146: mol_type = other RNA
gtgaagacaagggcctccaggttttagagctagaaatagcaagttaaaataaggctagtccgttatcaacttgaaaaagtggcaccgagtcggtgcatgatcctgacgacggagaccgccgtcgtcgacaagccgaggcccttgtc

SEQ ID NO: 1039 - RNA, 154 nt, synthetic construct
  source 1..154: mol_type = other RNA
gtgaagacaagggcctccaggttttagagctagaaatagcaagttaaaataaggctagtccgttatcaacttgaaaaagtggcaccgagtcggtgcatgatcctgacgacggagaccgccgtcgtcgacaagccgaggcccttgtcattttttt

SEQ ID NO: 1040 - RNA, 144 nt, synthetic construct
  source 1..144: mol_type = other RNA
gtgaagacaagggcctccaggttttagagctagaaatagcaagttaaaataaggctagtccgttatcaacttgaaaaagtggcaccgagtcggtgcatgatcctgacgacggagaccgccgtcgtcgacaagccgaggcccttg

SEQ ID NO: 1041 - RNA, 152 nt, synthetic construct
  source 1..152: mol_type = other RNA
gtgaagacaagggcctccaggttttagagctagaaatagcaagttaaaataaggctagtccgttatcaacttgaaaaagtggcaccgagtcggtgcatgatcctgacgacggagaccgccgtcgtcgacaagccgaggcccttgattttttt

SEQ ID NO: 1042 - RNA, 124 nt, synthetic construct
  source 1..124: mol_type = other RNA
gtgaagacaagggcctccaggttttagagctagaaatagcaagttaaaataaggctagtccgttatcaacttgaaaaagtggcaccgagtcggtgcaaagtctcatttgacttagaggcccttg

SEQ ID NO: 1043 - RNA, 131 nt, synthetic construct
  source 1..131: mol_type = other RNA
gtgaagacaagggcctccaggttttagagctagaaatagcaagttaaaataaggctagtccgttatcaacttgaaaaagtggcaccgagtcggtgcaaagtctcatttgacttagaggcccttgttttttt

SEQ ID NO: 1044 - RNA, 124 nt, synthetic construct
  source 1..124: mol_type = other RNA
gtgaagacaagggcctccaggttttagagctagaaatagcaagttaaaataaggctagtccgttatcaacttgaaaaagtggcaccgagtcggtgcaggcaggatcttgaaattgaggcccttg

SEQ ID NO: 1045 - RNA, 131 nt, synthetic construct
  source 1..131: mol_type = other RNA
gtgaagacaagggcctccaggttttagagctagaaatagcaagttaaaataaggctagtccgttatcaacttgaaaaagtggcaccgagtcggtgcaggcaggatcttgaaattgaggcccttgttttttt

SEQ ID NO: 1046 - RNA, 124 nt, synthetic construct
  source 1..124: mol_type = other RNA
gtgaagacaagggcctccaggttttagagctagaaatagcaagttaaaataaggctagtccgttatcaacttgaaaaagtggcaccgagtcggtgcgtacatggcagagagcaagaggcccttg

SEQ ID NO: 1047 - RNA, 131 nt, synthetic construct
  source 1..131: mol_type = other RNA
gtgaagacaagggcctccaggttttagagctagaaatagcaagttaaaataaggctagtccgttatcaacttgaaaaagtggcaccgagtcggtgcgtacatggcagagagcaagaggcccttgttttttt

SEQ ID NO: 1048 - RNA, 121 nt, synthetic construct
  source 1..121: mol_type = other RNA
gtgaagacaagggcctccaggttttagagctagaaatagcaagttaaaataaggctagtccgttatcaacttgaaaaagtggcaccgagtcggtgcagaacggccaaaggtgaggcccttg

SEQ ID NO: 1049 - RNA, 128 nt, synthetic construct
  source 1..128: mol_type = other RNA
gtgaagacaagggcctccaggttttagagctagaaatagcaagttaaaataaggctagtccgttatcaacttgaaaaagtggcaccgagtcggtgcagaacggccaaaggtgaggcccttgttttttt

SEQ ID NO: 1050 - RNA, 124 nt, synthetic construct
  source 1..124: mol_type = other RNA
gtgaagacaagggcctccaggttttagagctagaaatagcaagttaaaataaggctagtccgttatcaacttgaaaaagtggcaccgagtcggtgcacccaagaggagggcagagaggcccttg

SEQ ID NO: 1051 - RNA, 131 nt, synthetic construct
  source 1..131: mol_type = other RNA
gtgaagacaagggcctccaggttttagagctagaaatagcaagttaaaataaggctagtccgttatcaacttgaaaaagtggcaccgagtcggtgcacccaagaggagggcagagaggcccttgttttttt

SEQ ID NO: 1052 - RNA, 121 nt, synthetic construct
  source 1..121: mol_type = other RNA
gtgaagacaagggcctccaggttttagagctagaaatagcaagttaaaataaggctagtccgttatcaacttgaaaaagtggcaccgagtcggtgcggacggcccgtacatgaggcccttg

SEQ ID NO: 1053 - RNA, 128 nt, synthetic construct
  source 1..128: mol_type = other RNA
gtgaagacaagggcctccaggttttagagctagaaatagcaagttaaaataaggctagtccgttatcaacttgaaaaagtggcaccgagtcggtgcggacggcccgtacatgaggcccttgttttttt

SEQ ID NO: 1054 - RNA, 124 nt, synthetic construct
  source 1..124: mol_type = other RNA
gtgaagacaagggcctccaggttttagagctagaaatagcaagttaaaataaggctagtccgttatcaacttgaaaaagtggcaccgagtcggtgcaggcctggcgtccaggccgaggcccttg

SEQ ID NO: 1055 - RNA, 131 nt, synthetic construct
  source 1..131: mol_type = other RNA
gtgaagacaagggcctccaggttttagagctagaaatagcaagttaaaataaggctagtccgttatcaacttgaaaaagtggcaccgagtcggtgcaggcctggcgtccaggccgaggcccttgttttttt

SEQ ID NO: 1056 - RNA, 121 nt, synthetic construct
  source 1..121: mol_type = other RNA
gtgaagacaagggcctccaggttttagagctagaaatagcaagttaaaataaggctagtccgttatcaacttgaaaaagtggcaccgagtcggtgcagccgccgtgcggcagaggcccttg

SEQ ID NO: 1057 - RNA, 128 nt, synthetic construct
  source 1..128: mol_type = other RNA
gtgaagacaagggcctccaggttttagagctagaaatagcaagttaaaataaggctagtccgttatcaacttgaaaaagtggcaccgagtcggtgcagccgccgtgcggcagaggcccttgttttttt

SEQ ID NO: 1058 - RNA, 128 nt, synthetic construct
  source 1..128: mol_type = other RNA
gtgaagacaagggcctccaggttttagagctagaaatagcaagttaaaataaggctagtccgttatcaacttgaaaaagtggcaccgagtcggtgctcatacacagagcaaactccaagaggcccttg

SEQ ID NO: 1059 - RNA, 135 nt, synthetic construct
  source 1..135: mol_type = other RNA
gtgaagacaagggcctccaggttttagagctagaaatagcaagttaaaataaggctagtccgttatcaacttgaaaaagtggcaccgagtcggtgctcatacacagagcaaactccaagaggcccttgttttttt

SEQ ID NO: 1060 - RNA, 126 nt, synthetic construct
  source 1..126: mol_type = other RNA
gtgaagacaagggcctccaggttttagagctagaaatagcaagttaaaataaggctagtccgttatcaacttgaaaaagtggcaccgagtcggtgcacagcaccatctagtgtaaagaggcccttg

SEQ ID NO: 1061 - RNA, 133 nt, synthetic construct
  source 1..133: mol_type = other RNA
gtgaagacaagggcctccaggttttagagctagaaatagcaagttaaaataaggctagtccgttatcaacttgaaaaagtggcaccgagtcggtgcacagcaccatctagtgtaaagaggcccttgttttttt

SEQ ID NO: 1062 - RNA, 126 nt, synthetic construct
  source 1..126: mol_type = other RNA
gtgaagacaagggcctccaggttttagagctagaaatagcaagttaaaataaggctagtccgttatcaacttgaaaaagtggcaccgagtcggtgcctcgtcactggatgtgaagtgaggcccttg

SEQ ID NO: 1063 - RNA, 133 nt, synthetic construct
  source 1..133: mol_type = other RNA
gtgaagacaagggcctccaggttttagagctagaaatagcaagttaaaataaggctagtccgttatcaacttgaaaaagtggcaccgagtcggtgcctcgtcactggatgtgaagtgaggcccttgttttttt

SEQ ID NO: 1064 - RNA, 128 nt, synthetic construct
  source 1..128: mol_type = other RNA
gtgaagacaagggcctccaggttttagagctagaaatagcaagttaaaataaggctagtccgttatcaacttgaaaaagtggcaccgagtcggtgcttgatgtcgtaggtgataccgcgaggcccttg

SEQ ID NO: 1065 - RNA, 135 nt, synthetic construct
  source 1..135: mol_type = other RNA
gtgaagacaagggcctccaggttttagagctagaaatagcaagttaaaataaggctagtccgttatcaacttgaaaaagtggcaccgagtcggtgcttgatgtcgtaggtgataccgcgaggcccttgttttttt

SEQ ID NO: 1066 - RNA, 126 nt, synthetic construct
  source 1..126: mol_type = other RNA
gtgaagacaagggcctccaggttttagagctagaaatagcaagttaaaataaggctagtccgttatcaacttgaaaaagtggcaccgagtcggtgcggatcgtccctcaggggcaggaggcccttg

SEQ ID NO: 1067 - RNA, 133 nt, synthetic construct
  source 1..133: mol_type = other RNA
gtgaagacaagggcctccaggttttagagctagaaatagcaagttaaaataaggctagtccgttatcaacttgaaaaagtggcaccgagtcggtgcggatcgtccctcaggggcaggaggcccttgttttttt

SEQ ID NO: 1068 - RNA, 129 nt, synthetic construct
  source 1..129: mol_type = other RNA
gtgaagacaagggcctccaggttttagagctagaaatagcaagttaaaataaggctagtccgttatcaacttgaaaaagtggcaccgagtcggtgctcgtggtctcgggcatcagacccgaggcccttg

SEQ ID NO: 1069 - RNA, 136 nt, synthetic construct
  source 1..136: mol_type = other RNA
gtgaagacaagggcctccaggttttagagctagaaatagcaagttaaaataaggctagtccgttatcaacttgaaaaagtggcaccgagtcggtgctcgtggtctcgggcatcagacccgaggcccttgttttttt

SEQ ID NO: 1070 - RNA, 126 nt, synthetic construct
  source 1..126: mol_type = other RNA
gtgaagacaagggcctccaggttttagagctagaaatagcaagttaaaataaggctagtccgttatcaacttgaaaaagtggcaccgagtcggtgcccgcactcggcccgtggggcgaggcccttg

SEQ ID NO: 1071 - RNA, 133 nt, synthetic construct
  source 1..133: mol_type = other RNA
gtgaagacaagggcctccaggttttagagctagaaatagcaagttaaaataaggctagtccgttatcaacttgaaaaagtggcaccgagtcggtgcccgcactcggcccgtggggcgaggcccttgttttttt

SEQ ID NO: 1072 - RNA, 136 nt, synthetic construct
  source 1..136: mol_type = other RNA
gtgaagacaagggcctccaggttttagagctagaaatagcaagttaaaataaggctagtccgttatcaacttgaaaaagtggcaccgagtcggtgcgatttgataatctcgtatatagagcagttagaggcccttg

SEQ ID NO: 1073 - RNA, 143 nt, synthetic construct
  source 1..143: mol_type = other RNA
gtgaagacaagggcctccaggttttagagctagaaatagcaagttaaaataaggctagtccgttatcaacttgaaaaagtggcaccgagtcggtgcgatttgataatctcgtatatagagcagttagaggcccttgttttttt

SEQ ID NO: 1074 - RNA, 136 nt, synthetic construct
  source 1..136: mol_type = other RNA
gtgaagacaagggcctccaggttttagagctagaaatagcaagttaaaataaggctagtccgttatcaacttgaaaaagtggcaccgagtcggtgcgtgtctcatgtttccttgtattacgttaccgaggcccttg

SEQ ID NO: 1075 - RNA, 143 nt, synthetic construct
  source 1..143: mol_type = other RNA
gtgaagacaagggcctccaggttttagagctagaaatagcaagttaaaataaggctagtccgttatcaacttgaaaaagtggcaccgagtcggtgcgtgtctcatgtttccttgtattacgttaccgaggcccttgttttttt

SEQ ID NO: 1076 - RNA, 136 nt, synthetic construct
  source 1..136: mol_type = other RNA
gtgaagacaagggcctccaggttttagagctagaaatagcaagttaaaataaggctagtccgttatcaacttgaaaaagtggcaccgagtcggtgcgtaatccaagctcactaggggcacaacttggaggcccttg

SEQ ID NO: 1077 - RNA, 143 nt, synthetic construct
  source 1..143: mol_type = other RNA
gtgaagacaagggcctccaggttttagagctagaaatagcaagttaaaataaggctagtccgttatcaacttgaaaaagtggcaccgagtcggtgcgtaatccaagctcactaggggcacaacttggaggcccttgttttttt

SEQ ID NO: 1078 - RNA, 136 nt, synthetic construct
  source 1..136: mol_type = other RNA
gtgaagacaagggcctccaggttttagagctagaaatagcaagttaaaataaggctagtccgttatcaacttgaaaaagtggcaccgagtcggtgcctatcatgcatggcgatcccaggttcgcgcgaggcccttg

SEQ ID NO: 1079 - RNA, 143 nt, synthetic construct
  source 1..143: mol_type = other RNA
gtgaagacaagggcctccaggttttagagctagaaatagcaagttaaaataaggctagtccgttatcaacttgaaaaagtggcaccgagtcggtgcctatcatgcatggcgatcccaggttcgcgcgaggcccttgttttttt

SEQ ID NO: 1080 - RNA, 144 nt, synthetic construct
  source 1..144: mol_type = other RNA
gtgaagacaagggcctccaggttttagagctagaaatagcaagttaaaataaggctagtccgttatcaacttgaaaaagtggcaccgagtcggtgcggcttgtcgacgacggcggtctccgtcgtcaggatcatgaggcccttg

SEQ ID NO: 1081 - RNA, 151 nt, synthetic construct
  source 1..151: mol_type = other RNA
gtgaagacaagggcctccaggttttagagctagaaatagcaagttaaaataaggctagtccgttatcaacttgaaaaagtggcaccgagtcggtgcggcttgtcgacgacggcggtctccgtcgtcaggatcatgaggcccttgttttttt

SEQ ID NO: 1082 - RNA, 127 nt, synthetic construct
  source 1..127: mol_type = other RNA
gtgaagacaagggcctccaggttttagagctagaaatagcaagttaaaataaggctagtccgttatcaacttgaaaaagtggcaccgagtcggtgcaaatatctgacccagttacggaggcccttgt

SEQ ID NO: 1083 - RNA, 134 nt, synthetic construct
  source 1..134: mol_type = other RNA
gtgaagacaagggcctccaggttttagagctagaaatagcaagttaaaataaggctagtccgttatcaacttgaaaaagtggcaccgagtcggtgcaaatatctgacccagttacggaggcccttgtttttttt

SEQ ID NO: 1084 - RNA, 129 nt, synthetic construct
  source 1..129: mol_type = other RNA
gtgaagacaagggcctccaggttttagagctagaaatagcaagttaaaataaggctagtccgttatcaacttgaaaaagtggcaccgagtcggtgcaaatatctgacccagttacggaggcccttgtct

SEQ ID NO: 1085 - RNA, 136 nt, synthetic construct
  source 1..136: mol_type = other RNA
gtgaagacaagggcctccaggttttagagctagaaatagcaagttaaaataaggctagtccgttatcaacttgaaaaagtggcaccgagtcggtgcaaatatctgacccagttacggaggcccttgtctttttttt

SEQ ID NO: 1086 - RNA, 132 nt, synthetic construct
  source 1..132: mol_type = other RNA
gtgaagacaagggcctccaggttttagagctagaaatagcaagttaaaataaggctagtccgttatcaacttgaaaaagtggcaccgagtcggtgccaaagaaatatctgacccagttacggaggcccttgt

SEQ ID NO: 1087 - RNA, 139 nt, synthetic construct
  source 1..139: mol_type = other RNA
gtgaagacaagggcctccaggttttagagctagaaatagcaagttaaaataaggctagtccgttatcaacttgaaaaagtggcaccgagtcggtgccaaagaaatatctgacccagttacggaggcccttgtttttttt

SEQ ID NO: 1088 - RNA, 134 nt, synthetic construct
  source 1..134: mol_type = other RNA
gtgaagacaagggcctccaggttttagagctagaaatagcaagttaaaataaggctagtccgttatcaacttgaaaaagtggcaccgagtcggtgccaaagaaatatctgacccagttacggaggcccttgtct

SEQ ID NO: 1089 - RNA, 141 nt, synthetic construct
  source 1..141: mol_type = other RNA
gtgaagacaagggcctccaggttttagagctagaaatagcaagttaaaataaggctagtccgttatcaacttgaaaaagtggcaccgagtcggtgccaaagaaatatctgacccagttacggaggcccttgtctttttttt

SEQ ID NO: 1090 - RNA, 137 nt, synthetic construct
  source 1..137: mol_type = other RNA
gtgaagacaagggcctccaggttttagagctagaaatagcaagttaaaataaggctagtccgttatcaacttgaaaaagtggcaccgagtcggtgcgggtacaaagaaatatctgacccagttacggaggcccttgt

SEQ ID NO: 1091 - RNA, 144 nt, synthetic construct
  source 1..144: mol_type = other RNA
gtgaagacaagggcctccaggttttagagctagaaatagcaagttaaaataaggctagtccgttatcaacttgaaaaagtggcaccgagtcggtgcgggtacaaagaaatatctgacccagttacggaggcccttgtttttttt

SEQ ID NO: 1092 - RNA, 139 nt, synthetic construct
  source 1..139: mol_type = other RNA
gtgaagacaagggcctccaggttttagagctagaaatagcaagttaaaataaggctagtccgttatcaacttgaaaaagtggcaccgagtcggtgcgggtacaaagaaatatctgacccagttacggaggcccttgtct

SEQ ID NO: 1093 - RNA, 146 nt, synthetic construct
  source 1..146: mol_type = other RNA
gtgaagacaagggcctccaggttttagagctagaaatagcaagttaaaataaggctagtccgttatcaacttgaaaaagtggcaccgagtcggtgcgggtacaaagaaatatctgacccagttacggaggcccttgtctttttttt

SEQ ID NO: 1094 - RNA, 142 nt, synthetic construct
  source 1..142: mol_type = other RNA
gtgaagacaagggcctccaggttttagagctagaaatagcaagttaaaataaggctagtccgttatcaacttgaaaaagtggcaccgagtcggtgcatgatcctgacgacggagaccgccgtcgtcgacaagccgaggccct

SEQ ID NO: 1095 - RNA, 149 nt, synthetic construct
  source 1..149: mol_type = other RNA
gtgaagacaagggcctccaggttttagagctagaaatagcaagttaaaataaggctagtccgttatcaacttgaaaaagtggcaccgagtcggtgcatgatcctgacgacggagaccgccgtcgtcgacaagccgaggccctttttttt

SEQ ID NO: 1096 - RNA, 143 nt, synthetic construct
  source 1..143: mol_type = other RNA
gtgaagacaagggcctccaggttttagagctagaaatagcaagttaaaataaggctagtccgttatcaacttgaaaaagtggcaccgagtcggtgcatgatcctgacgacggagaccgccgtcgtcgacaagccgaggccctt

SEQ ID NO: 1097 - RNA, 150 nt, synthetic construct
  source 1..150: mol_type = other RNA
gtgaagacaagggcctccaggttttagagctagaaatagcaagttaaaataaggctagtccgttatcaacttgaaaaagtggcaccgagtcggtgcatgatcctgacgacggagaccgccgtcgtcgacaagccgaggcccttttttttt

SEQ ID NO: 1098 - RNA, 151 nt, synthetic construct
  source 1..151: mol_type = other RNA
gtgaagacaagggcctccaggttttagagctagaaatagcaagttaaaataaggctagtccgttatcaacttgaaaaagtggcaccgagtcggtgcatgatcctgacgacggagaccgccgtcgtcgacaagccgaggcccttgttttttt

SEQ ID NO: 1099 - RNA, 145 nt, synthetic construct
  source 1..145: mol_type = other RNA
gtgaagacaagggcctccaggttttagagctagaaatagcaagttaaaataaggctagtccgttatcaacttgaaaaagtggcaccgagtcggtgcatgatcctgacgacggagaccgccgtcgtcgacaagccgaggcccttgt

SEQ ID NO: 1100 - RNA, 152 nt, synthetic construct
  source 1..152: mol_type = other RNA
gtgaagacaagggcctccaggttttagagctagaaatagcaagttaaaataaggctagtccgttatcaacttgaaaaagtggcaccgagtcggtgcatgatcctgacgacggagaccgccgtcgtcgacaagccgaggcccttgtttttttt

SEQ ID NO: 1101 - RNA, 153 nt, synthetic construct
  source 1..153: mol_type = other RNA
gtgaagacaagggcctccaggttttagagctagaaatagcaagttaaaataaggctagtccgttatcaacttgaaaaagtggcaccgagtcggtgcatgatcctgacgacggagaccgccgtcgtcgacaagccgaggcccttgtcttttttt

SEQ ID NO: 1102 - RNA, 147 nt, synthetic construct
  source 1..147: mol_type = other RNA
gtgaagacaagggcctccaggttttagagctagaaatagcaagttaaaataaggctagtccgttatcaacttgaaaaagtggcaccgagtcggtgcatgatcctgacgacggagaccgccgtcgtcgacaagccgaggcccttgtct

SEQ ID NO: 1103 - RNA, 154 nt, synthetic construct
  source 1..154: mol_type = other RNA
gtgaagacaagggcctccaggttttagagctagaaatagcaagttaaaataaggctagtccgttatcaacttgaaaaagtggcaccgagtcggtgcatgatcctgacgacggagaccgccgtcgtcgacaagccgaggcccttgtctttttttt

SEQ ID NO: 1104 - RNA, 148 nt, synthetic construct
  source 1..148: mol_type = other RNA
gtgaagacaagggcctccaggttttagagctagaaatagcaagttaaaataaggctagtccgttatcaacttgaaaaagtggcaccgagtcggtgcatgatcctgacgacggagaccgccgtcgtcgacaagccgaggcccttgtctt

SEQ ID NO: 1105 - RNA, 155 nt, synthetic construct
  source 1..155: mol_type = other RNA
gtgaagacaagggcctccaggttttagagctagaaatagcaagttaaaataaggctagtccgttatcaacttgaaaaagtggcaccgagtcggtgcatgatcctgacgacggagaccgccgtcgtcgacaagccgaggcccttgtcttttttttt

SEQ ID NO: 1106 - RNA, 149 nt, synthetic construct
  source 1..149: mol_type = other RNA
gtgaagacaagggcctccaggttttagagctagaaatagcaagttaaaataaggctagtccgttatcaacttgaaaaagtggcaccgagtcggtgcatgatcctgacgacggagaccgccgtcgtcgacaagccgaggcccttgtcttc

SEQ ID NO: 1107 - RNA, 156 nt, synthetic construct
  source 1..156: mol_type = other RNA
gtgaagacaagggcctccaggttttagagctagaaatagcaagttaaaataaggctagtccgttatcaacttgaaaaagtggcaccgagtcggtgcatgatcctgacgacggagaccgccgtcgtcgacaagccgaggcccttgtcttcttttttt

SEQ ID NO: 1108 - RNA, 150 nt, synthetic construct
  source 1..150: mol_type = other RNA
gtgaagacaagggcctccaggttttagagctagaaatagcaagttaaaataaggctagtccgttatcaacttgaaaaagtggcaccgagtcggtgcatgatcctgacgacggagaccgccgtcgtcgacaagccgaggcccttgtcttca

SEQ ID NO: 1109 - RNA, 157 nt, synthetic construct
  source 1..157: mol_type = other RNA
gtgaagacaagggcctccaggttttagagctagaaatagcaagttaaaataaggctagtccgttatcaacttgaaaaagtggcaccgagtcggtgcatgatcctgacgacggagaccgccgtcgtcgacaagccgaggcccttgtcttcattttttt

SEQ ID NO: 1110 - RNA, 151 nt, synthetic construct
  source 1..151: mol_type = other RNA
gtgaagacaagggcctccaggttttagagctagaaatagcaagttaaaataaggctagtccgttatcaacttgaaaaagtggcaccgagtcggtgcatgatcctgacgacggagaccgccgtcgtcgacaagccgaggcccttgtcttcac

SEQ ID NO: 1111 - RNA, 158 nt, synthetic construct
  source 1..158: mol_type = other RNA
gtgaagacaagggcctccaggttttagagctagaaatagcaagttaaaataaggctagtccgttatcaacttgaaaaagtggcaccgagtcggtgcatgatcctgacgacggagaccgccgtcgtcgacaagccgaggcccttgtcttcacttttttt

SEQ ID NO: 1112 - RNA, 147 nt, synthetic construct
  source 1..147: mol_type = other RNA
gtgaagacaagggcctccaggtttaagagcggggaaatccgcaagtttaaataaggctagtccgttatcagcgtgaaaacgcggcaccgagtcggtgcatgatcctgacgacggagaccgccgtcgtcgacaagccgaggcccttgt

SEQ ID NO: 1113 - RNA, 154 nt, synthetic construct
  source 1..154: mol_type = other RNA
gtgaagacaagggcctccaggtttaagagcggggaaatccgcaagtttaaataaggctagtccgttatcagcgtgaaaacgcggcaccgagtcggtgcatgatcctgacgacggagaccgccgtcgtcgacaagccgaggcccttgtttttttt

SEQ ID NO: 1114 - RNA, 188 nt, synthetic construct
  source 1..188: mol_type = other RNA
gtgaagacaagggcctccaggttttagagctagaaatagcaagttaaaataaggctagtccgttatcaacttgaaaaagtggcaccgagtcggtgcatgatcctgacgacggagaccgccgtcgtcgacaagccgaggcccttgtaagatccgcggttctatctagttacgcgttaaaccaactagaa

SEQ ID NO: 1115 - RNA, 195 nt, synthetic construct
  source 1..195: mol_type = other RNA
gtgaagacaagggcctccaggttttagagctagaaatagcaagttaaaataaggctagtccgttatcaacttgaaaaagtggcaccgagtcggtgcatgatcctgacgacggagaccgccgtcgtcgacaagccgaggcccttgtaagatccgcggttctatctagttacgcgttaaaccaactagaattttttt

SEQ ID NO: 1116 - RNA, 188 nt, synthetic construct
  source 1..188: mol_type = other RNA
gtgaagacaagggcctccaggttttagagctagaaatagcaagttaaaataaggctagtccgttatcaacttgaaaaagtggcaccgagtcggtgcatgatcctgacgacggagaccgccgtcgtcgacaagccgaggcccttgtaaaatccgcggttctatctagttacgcgttaaaccaactagaa

SEQ ID NO: 1117 - RNA, 195 nt, synthetic construct
  source 1..195: mol_type = other RNA
gtgaagacaagggcctccaggttttagagctagaaatagcaagttaaaataaggctagtccgttatcaacttgaaaaagtggcaccgagtcggtgcatgatcctgacgacggagaccgccgtcgtcgacaagccgaggcccttgtaaaatccgcggttctatctagttacgcgttaaaccaactagaattttttt

SEQ ID NO: 1118 - RNA, 190 nt, synthetic construct
  source 1..190: mol_type = other RNA
gtgaagacaagggcctccaggtttaagagcggggaaatccgcaagtttaaataaggctagtccgttatcagcgtgaaaacgcggcaccgagtcggtgcatgatcctgacgacggagaccgccgtcgtcgacaagccgaggcccttgtattgtccgcggttctatctagttacgcgttaaaccaactagaa

SEQ ID NO: 1119 - RNA, 197 nt, synthetic construct
  source 1..197: mol_type = other RNA
gtgaagacaagggcctccaggtttaagagcggggaaatccgcaagtttaaataaggctagtccgttatcagcgtgaaaacgcggcaccgagtcggtgcatgatcctgacgacggagaccgccgtcgtcgacaagccgaggcccttgtattgtccgcggttctatctagttacgcgttaaaccaactagaattttttt

SEQ ID NO: 1120 - RNA, 190 nt, synthetic construct
  source 1..190: mol_type = other RNA
gtgaagacaagggcctccaggtttaagagcggggaaatccgcaagtttaaataaggctagtccgttatcagcgtgaaaacgcggcaccgagtcggtgcatgatcctgacgacggagaccgccgtcgtcgacaagccgaggcccttgtaatatccgcggttctatctagttacgcgttaaaccaactagaa

SEQ ID NO: 1121 - RNA, 197 nt, synthetic construct
  source 1..197: mol_type = other RNA
gtgaagacaagggcctccaggtttaagagcggggaaatccgcaagtttaaataaggctagtccgttatcagcgtgaaaacgcggcaccgagtcggtgcatgatcctgacgacggagaccgccgtcgtcgacaagccgaggcccttgtaatatccgcggttctatctagttacgcgttaaaccaactagaattttttt

SEQ ID NO: 1122 - RNA, 147 nt, synthetic construct
  source 1..147: mol_type = other RNA
gtgaagacaagggcctccaggtataagagcggggaaatccgcaagtttatataagactagttcgttatcagcgtgaaaacgcggcaccgagtcggtgcatgatcctgacgacggagaccgccgtcgtcgacaagccgaggcccttgt

SEQ ID NO: 1123 - RNA, 154 nt, synthetic construct
  source 1..154: mol_type = other RNA
gtgaagacaagggcctccaggtataagagcggggaaatccgcaagtttatataagactagttcgttatcagcgtgaaaacgcggcaccgagtcggtgcatgatcctgacgacggagaccgccgtcgtcgacaagccgaggcccttgtttttttt

SEQ ID NO: 1124 - RNA, 147 nt, synthetic construct
  source 1..147: mol_type = other RNA
gtgaagacaagggcctccaggtataagagcggggaaatccgcatgtttatataagactagttcgttaccagcgtgaaaacgcggcaccgagtcggtgcatgatcctgacgacggagaccgccgtcgtcgacaagccgaggcccttgt

SEQ ID NO: 1125 - RNA, 154 nt, synthetic construct
  source 1..154: mol_type = other RNA
gtgaagacaagggcctccaggtataagagcggggaaatccgcatgtttatataagactagttcgttaccagcgtgaaaacgcggcaccgagtcggtgcatgatcctgacgacggagaccgccgtcgtcgacaagccgaggcccttgtttttttt

SEQ ID NO: 1126-1127 - skipped (2 entries)

SEQ ID NO: 1128 - RNA, 151 nt, synthetic construct
  source 1..151: mol_type = other RNA
gtgaagacaagggcctccaggttttagagctagaaatagcaagttaaaataaggctagtccgttatcaacttgaaaaagtggcaccgagtcggtgcatgatcctgacgacggagaccgccgtcgtcgacaagccgaggcccttgtcatttt

SEQ ID NO: 1129 - RNA, 147 nt, synthetic construct
  source 1..147: mol_type = other RNA
gtgaagacaagggcctccaggttttagagctagaaatagcaagttaaaataaggctagtccgttatcaacttgaaaaagtggcaccgagtcggtgcatgatcctgacgacggagaccgccgtcgtcgacaagccgaggcccttgtca

SEQ ID NO: 1130 - RNA, 149 nt, synthetic construct
  source 1..149: mol_type = other RNA
gtgaagacaagggcctccaggttttagagctagaaatagcaagttaaaataaggctagtccgttatcaacttgaaaaagtggcaccgagtcggtgcatgatcctgacgacggagaccgccgtcgtcgacaagccgaggcccttgatttt

SEQ ID NO: 1131 - RNA, 145 nt, synthetic construct
  source 1..145: mol_type = other RNA
gtgaagacaagggcctccaggttttagagctagaaatagcaagttaaaataaggctagtccgttatcaacttgaaaaagtggcaccgagtcggtgcatgatcctgacgacggagaccgccgtcgtcgacaagccgaggcccttga

SEQ ID NO: 1132 - RNA, 20 nt, synthetic construct
  source 1..20: mol_type = other RNA
gattgggggagatacagagg

SEQ ID NO: 1133 - RNA, 17 nt, synthetic construct
  source 1..17: mol_type = other RNA
tgggggagatacagagg

SEQ ID NO: 1134 - RNA, 18 nt, synthetic construct
  source 1..18: mol_type = other RNA
ttgggggagatacagagg

SEQ ID NO: 1135 - RNA, 19 nt, synthetic construct
  source 1..19: mol_type = other RNA
attgggggagatacagagg

SEQ ID NO: 1136 - RNA, 21 nt, synthetic construct
  source 1..21: mol_type = other RNA
ggattgggggagatacagagg

SEQ ID NO: 1137 - RNA, 22 nt, synthetic construct
  source 1..22: mol_type = other RNA
tggattgggggagatacagagg

SEQ ID NO: 1138-1142 - skipped (5 entries)

SEQ ID NO: 1143 - RNA, 10 nt, synthetic construct
  source 1..10: mol_type = other RNA
ctgtatctcc

SEQ ID NO: 1144 - RNA, 11 nt, synthetic construct
  source 1..11: mol_type = other RNA
ctgtatctccc

SEQ ID NO: 1145 - RNA, 12 nt, synthetic construct
  source 1..12: mol_type = other RNA
ctgtatctcccc

SEQ ID NO: 1146 - RNA, 13 nt, synthetic construct
  source 1..13: mol_type = other RNA
ctgtatctccccc

SEQ ID NO: 1147 - RNA, 14 nt, synthetic construct
  source 1..14: mol_type = other RNA
ctgtatctccccca

SEQ ID NO: 1148 - RNA, 15 nt, synthetic construct
  source 1..15: mol_type = other RNA
ctgtatctcccccaa

SEQ ID NO: 1149 - RNA, 16 nt, synthetic construct
  source 1..16: mol_type = other RNA
ctgtatctcccccaat

SEQ ID NO: 1150 - RNA, 17 nt, synthetic construct
  source 1..17: mol_type = other RNA
ctgtatctcccccaatc

SEQ ID NO: 1151 - RNA, 18 nt, synthetic construct
  source 1..18: mol_type = other RNA
ctgtatctcccccaatcc

SEQ ID NO: 1152 - RNA, 19 nt, synthetic construct
  source 1..19: mol_type = other RNA
ctgtatctcccccaatcca

SEQ ID NO: 1153 - RNA, 146 nt, synthetic construct
  source 1..146: mol_type = other RNA
gattgggggagatacagagggttttagagctagaaatagcaagttaaaataaggctagtccgttatcaacttgaaaaagtggcaccgagtcggtgcatgatcctgacgacggagaccgccgtcgtcgacaagccctgtatctcccc

SEQ ID NO: 1154 - RNA, 153 nt, synthetic construct
  source 1..153: mol_type = other RNA
gattgggggagatacagagggttttagagctagaaatagcaagttaaaataaggctagtccgttatcaacttgaaaaagtggcaccgagtcggtgcatgatcctgacgacggagaccgccgtcgtcgacaagccctgtatctccccttttttt

SEQ ID NO: 1155 - RNA, 144 nt, synthetic construct
  source 1..144: mol_type = other RNA
gattgggggagatacagagggttttagagctagaaatagcaagttaaaataaggctagtccgttatcaacttgaaaaagtggcaccgagtcggtgcatgatcctgacgacggagaccgccgtcgtcgacaagccctgtatctcc

SEQ ID NO: 1156 - RNA, 151 nt, synthetic construct
  source 1..151: mol_type = other RNA
gattgggggagatacagagggttttagagctagaaatagcaagttaaaataaggctagtccgttatcaacttgaaaaagtggcaccgagtcggtgcatgatcctgacgacggagaccgccgtcgtcgacaagccctgtatctccttttttt

SEQ ID NO: 1157 - RNA, 150 nt, synthetic construct
  source 1..150: mol_type = other RNA
gattgggggagatacagagggttttagagctagaaatagcaagttaaaataaggctagtccgttatcaacttgaaaaagtggcaccgagtcggtgcatgatcctgacgacggagaccgccgtcgtcgacaagccctgtatctcccctttt

SEQ ID NO: 1158 - RNA, 148 nt, synthetic construct
  source 1..148: mol_type = other RNA
gattgggggagatacagagggttttagagctagaaatagcaagttaaaataaggctagtccgttatcaacttgaaaaagtggcaccgagtcggtgcatgatcctgacgacggagaccgccgtcgtcgacaagccctgtatctcctttt

SEQ ID NO: 1159 - RNA, 20 nt, synthetic construct
  source 1..20: mol_type = other RNA
tcaggacccatacctcgcag

SEQ ID NO: 1160 - RNA, 17 nt, synthetic construct
  source 1..17: mol_type = other RNA
ggacccatacctcgcag

SEQ ID NO: 1161 - RNA, 18 nt, synthetic construct
  source 1..18: mol_type = other RNA
aggacccatacctcgcag

SEQ ID NO: 1162 - RNA, 19 nt, synthetic construct
  source 1..19: mol_type = other RNA
caggacccatacctcgcag

SEQ ID NO: 1163 - RNA, 21 nt, synthetic construct
  source 1..21: mol_type = other RNA
atcaggacccatacctcgcag

SEQ ID NO: 1164 - RNA, 22 nt, synthetic construct
  source 1..22: mol_type = other RNA
aatcaggacccatacctcgcag

SEQ ID NO: 1165-1169 - skipped (5 entries)

SEQ ID NO: 1170 - RNA, 10 nt, synthetic construct
  source 1..10: mol_type = other RNA
cgaggtatgg

SEQ ID NO: 1171 - RNA, 11 nt, synthetic construct
  source 1..11: mol_type = other RNA
cgaggtatggg

SEQ ID NO: 1172 - RNA, 12 nt, synthetic construct
  source 1..12: mol_type = other RNA
cgaggtatgggt

SEQ ID NO: 1173 - RNA, 13 nt, synthetic construct
  source 1..13: mol_type = other RNA
cgaggtatgggtc

SEQ ID NO: 1174 - RNA, 14 nt, synthetic construct
  source 1..14: mol_type = other RNA
cgaggtatgggtcc

SEQ ID NO: 1175 - RNA, 15 nt, synthetic construct
  source 1..15: mol_type = other RNA
cgaggtatgggtcct

SEQ ID NO: 1176 - RNA, 16 nt, synthetic construct
  source 1..16: mol_type = other RNA
cgaggtatgggtcctg

SEQ ID NO: 1177 - RNA, 17 nt, synthetic construct
  source 1..17: mol_type = other RNA
cgaggtatgggtcctga

SEQ ID NO: 1178 - RNA, 18 nt, synthetic construct
  source 1..18: mol_type = other RNA
cgaggtatgggtcctgat

SEQ ID NO: 1179 - RNA, 19 nt, synthetic construct
  source 1..19: mol_type = other RNA
cgaggtatgggtcctgatt

SEQ ID NO: 1180 - RNA, 146 nt, synthetic construct
  source 1..146: mol_type = other RNA
tcaggacccatacctcgcaggttttagagctagaaatagcaagttaaaataaggctagtccgttatcaacttgaaaaagtggcaccgagtcggtgcatgatcctgacgacggagaccgccgtcgtcgacaagcccgaggtatgggt

SEQ ID NO: 1181 - RNA, 154 nt, synthetic construct
  source 1..154: mol_type = other RNA
gtcaggacccatacctcgcaggttttagagctagaaatagcaagttaaaataaggctagtccgttatcaacttgaaaaagtggcaccgagtcggtgcatgatcctgacgacggagaccgccgtcgtcgacaagcccgaggtatgggtttttttt

SEQ ID NO: 1182 - RNA, 144 nt, synthetic construct
  source 1..144: mol_type = other RNA
tcaggacccatacctcgcaggttttagagctagaaatagcaagttaaaataaggctagtccgttatcaacttgaaaaagtggcaccgagtcggtgcatgatcctgacgacggagaccgccgtcgtcgacaagcccgaggtatgg

SEQ ID NO: 1183 - RNA, 152 nt, synthetic construct
  source 1..152: mol_type = other RNA
gtcaggacccatacctcgcaggttttagagctagaaatagcaagttaaaataaggctagtccgttatcaacttgaaaaagtggcaccgagtcggtgcatgatcctgacgacggagaccgccgtcgtcgacaagcccgaggtatggttttttt

SEQ ID NO: 1184 - RNA, 150 nt, synthetic construct
  source 1..150: mol_type = other RNA
tcaggacccatacctcgcaggttttagagctagaaatagcaagttaaaataaggctagtccgttatcaacttgaaaaagtggcaccgagtcggtgcatgatcctgacgacggagaccgccgtcgtcgacaagcccgaggtatgggttttt

SEQ ID NO: 1185 - RNA, 148 nt, synthetic construct
  source 1..148: mol_type = other RNA
tcaggacccatacctcgcaggttttagagctagaaatagcaagttaaaataaggctagtccgttatcaacttgaaaaagtggcaccgagtcggtgcatgatcctgacgacggagaccgccgtcgtcgacaagcccgaggtatggtttt

SEQ ID NO: 1186 - RNA, 20 nt, synthetic construct
  source 1..20: mol_type = other RNA
accccaagtacagagcctga

SEQ ID NO: 1187 - RNA, 17 nt, synthetic construct
  source 1..17: mol_type = other RNA
ccaagtacagagcctga

SEQ ID NO: 1188 - RNA, 18 nt, synthetic construct
  source 1..18: mol_type = other RNA
cccaagtacagagcctga

SEQ ID NO: 1189 - RNA, 19 nt, synthetic construct
  source 1..19: mol_type = other RNA
ccccaagtacagagcctga

SEQ ID NO: 1190 - RNA, 21 nt, synthetic construct
  source 1..21: mol_type = other RNA
taccccaagtacagagcctga

SEQ ID NO: 1191 - RNA, 22 nt, synthetic construct
  source 1..22: mol_type = other RNA
ataccccaagtacagagcctga

SEQ ID NO: 1192-1196 - skipped (5 entries)

SEQ ID NO: 1197 - RNA, 10 nt, synthetic construct
  source 1..10: mol_type = other RNA
ggctctgtac

SEQ ID NO: 1198 - RNA, 11 nt, synthetic construct
  source 1..11: mol_type = other RNA
ggctctgtact

SEQ ID NO: 1199 - RNA, 12 nt, synthetic construct
  source 1..12: mol_type = other RNA
ggctctgtactt

SEQ ID NO: 1200 - RNA, 13 nt, synthetic construct
  source 1..13: mol_type = other RNA
ggctctgtacttg

SEQ ID NO: 1201 - RNA, 14 nt, synthetic construct
  source 1..14: mol_type = other RNA
ggctctgtacttgg

SEQ ID NO: 1202 - RNA, 15 nt, synthetic construct
  source 1..15: mol_type = other RNA
ggctctgtacttggg

SEQ ID NO: 1203 - RNA, 16 nt, synthetic construct
  source 1..16: mol_type = other RNA
ggctctgtacttgggg

SEQ ID NO: 1204 - RNA, 17 nt, synthetic construct
  source 1..17: mol_type = other RNA
ggctctgtacttggggt

SEQ ID NO: 1205 - RNA, 18 nt, synthetic construct
  source 1..18: mol_type = other RNA
ggctctgtacttggggta

SEQ ID NO: 1206 - RNA, 19 nt, synthetic construct
  source 1..19: mol_type = other RNA
ggctctgtacttggggtat

SEQ ID NO: 1207 - RNA, 146 nt, synthetic construct
  source 1..146: mol_type = other RNA
accccaagtacagagcctgagttttagagctagaaatagcaagttaaaataaggctagtccgttatcaacttgaaaaagtggcaccgagtcggtgcatgatcctgacgacggagaccgccgtcgtcgacaagccggctctgtactt

SEQ ID NO: 1208 - RNA, 154 nt, synthetic construct
  source 1..154: mol_type = other RNA
gaccccaagtacagagcctgagttttagagctagaaatagcaagttaaaataaggctagtccgttatcaacttgaaaaagtggcaccgagtcggtgcatgatcctgacgacggagaccgccgtcgtcgacaagccggctctgtacttttttttt

SEQ ID NO: 1209 - RNA, 144 nt, synthetic construct
  source 1..144: mol_type = other RNA
accccaagtacagagcctgagttttagagctagaaatagcaagttaaaataaggctagtccgttatcaacttgaaaaagtggcaccgagtcggtgcatgatcctgacgacggagaccgccgtcgtcgacaagccggctctgtac

SEQ ID NO: 1210 - RNA, 153 nt, synthetic construct
  source 1..153: mol_type = other RNA
gaccccaagtacagagcctgagttttagagctagaaatagcaagttaaaataaggctagtccgttatcaacttgaaaaagtggcaccgagtcggtgcatgatcctgacgacggagaccgccgtcgtcgacaagccggctctgtacattttttt

SEQ ID NO: 1211 - skipped

SEQ ID NO: 1212 - RNA, 150 nt, synthetic construct
  source 1..150: mol_type = other RNA
accccaagtacagagcctgagttttagagctagaaatagcaagttaaaataaggctagtccgttatcaacttgaaaaagtggcaccgagtcggtgcatgatcctgacgacggagaccgccgtcgtcgacaagccggctctgtactttttt

SEQ ID NO: 1213 - RNA, 149 nt, synthetic construct
  source 1..149: mol_type = other RNA
accccaagtacagagcctgagttttagagctagaaatagcaagttaaaataaggctagtccgttatcaacttgaaaaagtggcaccgagtcggtgcatgatcctgacgacggagaccgccgtcgtcgacaagccggctctgtacatttt

SEQ ID NO: 1214 - RNA, 145 nt, synthetic construct
  source 1..145: mol_type = other RNA
accccaagtacagagcctgagttttagagctagaaatagcaagttaaaataaggctagtccgttatcaacttgaaaaagtggcaccgagtcggtgcatgatcctgacgacggagaccgccgtcgtcgacaagccggctctgtaca

SEQ ID NO: 1215 - RNA, 20 nt, synthetic construct
  source 1..20: mol_type = other RNA
gccccagagtctgtgcacag

SEQ ID NO: 1216 - RNA, 17 nt, synthetic construct
  source 1..17: mol_type = other RNA
ccagagtctgtgcacag

SEQ ID NO: 1217 - RNA, 18 nt, synthetic construct
  source 1..18: mol_type = other RNA
cccagagtctgtgcacag

SEQ ID NO: 1218 - RNA, 19 nt, synthetic construct
  source 1..19: mol_type = other RNA
ccccagagtctgtgcacag

SEQ ID NO: 1219 - RNA, 21 nt, synthetic construct
  source 1..21: mol_type = other RNA
ggccccagagtctgtgcacag

SEQ ID NO: 1220 - RNA, 22 nt, synthetic construct
  source 1..22: mol_type = other RNA
tggccccagagtctgtgcacag

SEQ ID NO: 1221-1225 - skipped (5 entries)

SEQ ID NO: 1226 - RNA, 10 nt, synthetic construct
  source 1..10: mol_type = other RNA
tgcacagact

SEQ ID NO: 1227 - RNA, 11 nt, synthetic construct
  source 1..11: mol_type = other RNA
tgcacagactc

SEQ ID NO: 1228 - RNA, 12 nt, synthetic construct
  source 1..12: mol_type = other RNA
tgcacagactct

SEQ ID NO: 1229 - RNA, 13 nt, synthetic construct
  source 1..13: mol_type = other RNA
tgcacagactctg

SEQ ID NO: 1230 - RNA, 14 nt, synthetic construct
  source 1..14: mol_type = other RNA
tgcacagactctgg

SEQ ID NO: 1231 - RNA, 15 nt, synthetic construct
  source 1..15: mol_type = other RNA
tgcacagactctggg

SEQ ID NO: 1232 - RNA, 16 nt, synthetic construct
  source 1..16: mol_type = other RNA
tgcacagactctgggg

SEQ ID NO: 1233 - RNA, 17 nt, synthetic construct
  source 1..17: mol_type = other RNA
tgcacagactctggggc

SEQ ID NO: 1234 - RNA, 18 nt, synthetic construct
  source 1..18: mol_type = other RNA
tgcacagactctggggcc

SEQ ID NO: 1235 - RNA, 19 nt, synthetic construct
  source 1..19: mol_type = other RNA
tgcacagactctggggcca

SEQ ID NO: 1236 - RNA, 146 nt, synthetic construct
  source 1..146: mol_type = other RNA
gccccagagtctgtgcacaggttttagagctagaaatagcaagttaaaataaggctagtccgttatcaacttgaaaaagtggcaccgagtcggtgcatgatcctgacgacggagaccgccgtcgtcgacaagcctgcacagactct

SEQ ID NO: 1237 - RNA, 153 nt, synthetic construct
  source 1..153: mol_type = other RNA
gccccagagtctgtgcacaggttttagagctagaaatagcaagttaaaataaggctagtccgttatcaacttgaaaaagtggcaccgagtcggtgcatgatcctgacgacggagaccgccgtcgtcgacaagcctgcacagactctttttttt

SEQ ID NO: 1238 - RNA, 144 nt, synthetic construct
  source 1..144: mol_type = other RNA
gccccagagtctgtgcacaggttttagagctagaaatagcaagttaaaataaggctagtccgttatcaacttgaaaaagtggcaccgagtcggtgcatgatcctgacgacggagaccgccgtcgtcgacaagcctgcacagact

SEQ ID NO: 1239 - RNA, 151 nt, synthetic construct
  source 1..151: mol_type = other RNA
gccccagagtctgtgcacaggttttagagctagaaatagcaagttaaaataaggctagtccgttatcaacttgaaaaagtggcaccgagtcggtgcatgatcctgacgacggagaccgccgtcgtcgacaagcctgcacagactttttttt

SEQ ID NO: 1240 - RNA, 124 nt, synthetic construct
  source 1..124: mol_type = other RNA
gccccagagtctgtgcacaggttttagagctagaaatagcaagttaaaataaggctagtccgttatcaacttgaaaaagtggcaccgagtcggtgcaaagtctcatttgacttatgcacagact

SEQ ID NO: 1241 - RNA, 132 nt, synthetic construct
  source 1..132: mol_type = other RNA
gccccagagtctgtgcacaggttttagagctagaaatagcaagttaaaataaggctagtccgttatcaacttgaaaaagtggcaccgagtcggtgcaaagtctcatttgacttatgcacagactattttttt

SEQ ID NO: 1242 - RNA, 124 nt, synthetic construct
  source 1..124: mol_type = other RNA
gccccagagtctgtgcacaggttttagagctagaaatagcaagttaaaataaggctagtccgttatcaacttgaaaaagtggcaccgagtcggtgcaggcaggatcttgaaatttgcacagact

SEQ ID NO: 1243 - RNA, 132 nt, synthetic construct
  source 1..132: mol_type = other RNA
gccccagagtctgtgcacaggttttagagctagaaatagcaagttaaaataaggctagtccgttatcaacttgaaaaagtggcaccgagtcggtgcaggcaggatcttgaaatttgcacagactattttttt

SEQ ID NO: 1244 - RNA, 124 nt, synthetic construct
  source 1..124: mol_type = other RNA
gccccagagtctgtgcacaggttttagagctagaaatagcaagttaaaataaggctagtccgttatcaacttgaaaaagtggcaccgagtcggtgcgtacatggcagagagcaatgcacagact

SEQ ID NO: 1245 - RNA, 132 nt, synthetic construct
  source 1..132: mol_type = other RNA
gccccagagtctgtgcacaggttttagagctagaaatagcaagttaaaataaggctagtccgttatcaacttgaaaaagtggcaccgagtcggtgcgtacatggcagagagcaatgcacagactattttttt

SEQ ID NO: 1246 - RNA, 121 nt, synthetic construct
  source 1..121: mol_type = other RNA
gccccagagtctgtgcacaggttttagagctagaaatagcaagttaaaataaggctagtccgttatcaacttgaaaaagtggcaccgagtcggtgcagaacggccaaaggttgcacagact

SEQ ID NO: 1247 - RNA, 129 nt, synthetic construct
  source 1..129: mol_type = other RNA
gccccagagtctgtgcacaggttttagagctagaaatagcaagttaaaataaggctagtccgttatcaacttgaaaaagtggcaccgagtcggtgcagaacggccaaaggttgcacagactattttttt

SEQ ID NO: 1248 - RNA, 124 nt, synthetic construct
  source 1..124: mol_type = other RNA
gccccagagtctgtgcacaggttttagagctagaaatagcaagttaaaataaggctagtccgttatcaacttgaaaaagtggcaccgagtcggtgcacccaagaggagggcagatgcacagact

SEQ ID NO: 1249 - RNA, 132 nt, synthetic construct
  source 1..132: mol_type = other RNA
gccccagagtctgtgcacaggttttagagctagaaatagcaagttaaaataaggctagtccgttatcaacttgaaaaagtggcaccgagtcggtgcacccaagaggagggcagatgcacagactattttttt

SEQ ID NO: 1250 - RNA, 121 nt, synthetic construct
  source 1..121: mol_type = other RNA
gccccagagtctgtgcacaggttttagagctagaaatagcaagttaaaataaggctagtccgttatcaacttgaaaaagtggcaccgagtcggtgcggacggcccgtacattgcacagact

SEQ ID NO: 1251 - RNA, 129 nt, synthetic construct
  source 1..129: mol_type = other RNA
gccccagagtctgtgcacaggttttagagctagaaatagcaagttaaaataaggctagtccgttatcaacttgaaaaagtggcaccgagtcggtgcggacggcccgtacattgcacagactattttttt

SEQ ID NO: 1252 - RNA, 124 nt, synthetic construct
  source 1..124: mol_type = other RNA
gccccagagtctgtgcacaggttttagagctagaaatagcaagttaaaataaggctagtccgttatcaacttgaaaaagtggcaccgagtcggtgcaggcctggcgtccaggcctgcacagact

SEQ ID NO: 1253 - RNA, 132 nt, synthetic construct
  source 1..132: mol_type = other RNA
gccccagagtctgtgcacaggttttagagctagaaatagcaagttaaaataaggctagtccgttatcaacttgaaaaagtggcaccgagtcggtgcaggcctggcgtccaggcctgcacagactattttttt

SEQ ID NO: 1254 - RNA, 121 nt, synthetic construct
  source 1..121: mol_type = other RNA
gccccagagtctgtgcacaggttttagagctagaaatagcaagttaaaataaggctagtccgttatcaacttgaaaaagtggcaccgagtcggtgcagccgccgtgcggcatgcacagact

SEQ ID NO: 1255 - RNA, 129 nt, synthetic construct
  source 1..129: mol_type = other RNA
gccccagagtctgtgcacaggttttagagctagaaatagcaagttaaaataaggctagtccgttatcaacttgaaaaagtggcaccgagtcggtgcagccgccgtgcggcatgcacagactattttttt

SEQ ID NO: 1256 - RNA, 128 nt, synthetic construct
  source 1..128: mol_type = other RNA
gccccagagtctgtgcacaggttttagagctagaaatagcaagttaaaataaggctagtccgttatcaacttgaaaaagtggcaccgagtcggtgctcatacacagagcaaactccaatgcacagact

SEQ ID NO: 1257 - RNA, 136 nt, synthetic construct
  source 1..136: mol_type = other RNA
gccccagagtctgtgcacaggttttagagctagaaatagcaagttaaaataaggctagtccgttatcaacttgaaaaagtggcaccgagtcggtgctcatacacagagcaaactccaatgcacagactattttttt

SEQ ID NO: 1258 - RNA, 126 nt, synthetic construct
  source 1..126: mol_type = other RNA
gccccagagtctgtgcacaggttttagagctagaaatagcaagttaaaataaggctagtccgttatcaacttgaaaaagtggcaccgagtcggtgcacagcaccatctagtgtaaatgcacagact

SEQ ID NO: 1259 - RNA, 134 nt, synthetic construct
  source 1..134: mol_type = other RNA
gccccagagtctgtgcacaggttttagagctagaaatagcaagttaaaataaggctagtccgttatcaacttgaaaaagtggcaccgagtcggtgcacagcaccatctagtgtaaatgcacagactattttttt

SEQ ID NO: 1260 - RNA, 126 nt, synthetic construct
  source 1..126: mol_type = other RNA
gccccagagtctgtgcacaggttttagagctagaaatagcaagttaaaataaggctagtccgttatcaacttgaaaaagtggcaccgagtcggtgcctcgtcactggatgtgaagttgcacagact

SEQ ID NO: 1261 - RNA, 134 nt, synthetic construct
  source 1..134: mol_type = other RNA
gccccagagtctgtgcacaggttttagagctagaaatagcaagttaaaataaggctagtccgttatcaacttgaaaaagtggcaccgagtcggtgcctcgtcactggatgtgaagttgcacagactattttttt

SEQ ID NO: 1262 - RNA, 128 nt, synthetic construct
  source 1..128: mol_type = other RNA
gccccagagtctgtgcacaggttttagagctagaaatagcaagttaaaataaggctagtccgttatcaacttgaaaaagtggcaccgagtcggtgcttgatgtcgtaggtgataccgctgcacagact

SEQ ID NO: 1263 - RNA, 136 nt, synthetic construct
  source 1..136: mol_type = other RNA
gccccagagtctgtgcacaggttttagagctagaaatagcaagttaaaataaggctagtccgttatcaacttgaaaaagtggcaccgagtcggtgcttgatgtcgtaggtgataccgctgcacagactattttttt

SEQ ID NO: 1264 - RNA, 126 nt, synthetic construct
  source 1..126: mol_type = other RNA
gccccagagtctgtgcacaggttttagagctagaaatagcaagttaaaataaggctagtccgttatcaacttgaaaaagtggcaccgagtcggtgcggatcgtccctcaggggcagtgcacagact

SEQ ID NO: 1265 - RNA, 134 nt, synthetic construct
  source 1..134: mol_type = other RNA
gccccagagtctgtgcacaggttttagagctagaaatagcaagttaaaataaggctagtccgttatcaacttgaaaaagtggcaccgagtcggtgcggatcgtccctcaggggcagtgcacagactattttttt

SEQ ID NO: 1266 - RNA, 129 nt, synthetic construct
  source 1..129: mol_type = other RNA
gccccagagtctgtgcacaggttttagagctagaaatagcaagttaaaataaggctagtccgttatcaacttgaaaaagtggcaccgagtcggtgctcgtggtctcgggcatcagaccctgcacagact

SEQ ID NO: 1267 - RNA, 137 nt, synthetic construct
  source 1..137: mol_type = other RNA
gccccagagtctgtgcacaggttttagagctagaaatagcaagttaaaataaggctagtccgttatcaacttgaaaaagtggcaccgagtcggtgctcgtggtctcgggcatcagaccctgcacagactattttttt

SEQ ID NO: 1268 - RNA, 126 nt, synthetic construct
  source 1..126: mol_type = other RNA
gccccagagtctgtgcacaggttttagagctagaaatagcaagttaaaataaggctagtccgttatcaacttgaaaaagtggcaccgagtcggtgcccgcactcggcccgtggggctgcacagact

SEQ ID NO: 1269 - RNA, 134 nt, synthetic construct
  source 1..134: mol_type = other RNA
gccccagagtctgtgcacaggttttagagctagaaatagcaagttaaaataaggctagtccgttatcaacttgaaaaagtggcaccgagtcggtgcccgcactcggcccgtggggctgcacagactattttttt

SEQ ID NO: 1270 - RNA, 136 nt, synthetic construct
  source 1..136: mol_type = other RNA
gccccagagtctgtgcacaggttttagagctagaaatagcaagttaaaataaggctagtccgttatcaacttgaaaaagtggcaccgagtcggtgcgatttgataatctcgtatatagagcagttatgcacagact

SEQ ID NO: 1271 - RNA, 144 nt, synthetic construct
  source 1..144: mol_type = other RNA
gccccagagtctgtgcacaggttttagagctagaaatagcaagttaaaataaggctagtccgttatcaacttgaaaaagtggcaccgagtcggtgcgatttgataatctcgtatatagagcagttatgcacagactattttttt

SEQ ID NO: 1272 - RNA, 136 nt, synthetic construct
  source 1..136: mol_type = other RNA
gccccagagtctgtgcacaggttttagagctagaaatagcaagttaaaataaggctagtccgttatcaacttgaaaaagtggcaccgagtcggtgcgtgtctcatgtttccttgtattacgttacctgcacagact

SEQ ID NO: 1273 - RNA, 144 nt, synthetic construct
  source 1..144: mol_type = other RNA
gccccagagtctgtgcacaggttttagagctagaaatagcaagttaaaataaggctagtccgttatcaacttgaaaaagtggcaccgagtcggtgcgtgtctcatgtttccttgtattacgttacctgcacagactattttttt

SEQ ID NO: 1274 - RNA, 136 nt, synthetic construct
  source 1..136: mol_type = other RNA
gccccagagtctgtgcacaggttttagagctagaaatagcaagttaaaataaggctagtccgttatcaacttgaaaaagtggcaccgagtcggtgcgtaatccaagctcactaggggcacaacttgtgcacagact

SEQ ID NO: 1275 - RNA, 144 nt, synthetic construct
  source 1..144: mol_type = other RNA
gccccagagtctgtgcacaggttttagagctagaaatagcaagttaaaataaggctagtccgttatcaacttgaaaaagtggcaccgagtcggtgcgtaatccaagctcactaggggcacaacttgtgcacagactattttttt

SEQ ID NO: 1276 - RNA, 136 nt, synthetic construct
  source 1..136: mol_type = other RNA
gccccagagtctgtgcacaggttttagagctagaaatagcaagttaaaataaggctagtccgttatcaacttgaaaaagtggcaccgagtcggtgcctatcatgcatggcgatcccaggttcgcgctgcacagact

SEQ ID NO: 1277 - RNA, 144 nt, synthetic construct
  source 1..144: mol_type = other RNA
gccccagagtctgtgcacaggttttagagctagaaatagcaagttaaaataaggctagtccgttatcaacttgaaaaagtggcaccgagtcggtgcctatcatgcatggcgatcccaggttcgcgctgcacagactattttttt

SEQ ID NO: 1278 - RNA, 144 nt, synthetic construct
  source 1..144: mol_type = other RNA
gccccagagtctgtgcacaggttttagagctagaaatagcaagttaaaataaggctagtccgttatcaacttgaaaaagtggcaccgagtcggtgcggcttgtcgacgacggcggtctccgtcgtcaggatcattgcacagact

SEQ ID NO: 1279 - RNA, 152 nt, synthetic construct
  source 1..152: mol_type = other RNA
gccccagagtctgtgcacaggttttagagctagaaatagcaagttaaaataaggctagtccgttatcaacttgaaaaagtggcaccgagtcggtgcggcttgtcgacgacggcggtctccgtcgtcaggatcattgcacagactattttttt

SEQ ID NO: 1280 - RNA, 127 nt, synthetic construct
  source 1..127: mol_type = other RNA
gccccagagtctgtgcacaggttttagagctagaaatagcaagttaaaataaggctagtccgttatcaacttgaaaaagtggcaccgagtcggtgcaaatatctgacccagttacgtgcacagactc

SEQ ID NO: 1281 - RNA, 134 nt, synthetic construct
  source 1..134: mol_type = other RNA
gccccagagtctgtgcacaggttttagagctagaaatagcaagttaaaataaggctagtccgttatcaacttgaaaaagtggcaccgagtcggtgcaaatatctgacccagttacgtgcacagactcttttttt

SEQ ID NO: 1282 - RNA, 129 nt, synthetic construct
  source 1..129: mol_type = other RNA
gccccagagtctgtgcacaggttttagagctagaaatagcaagttaaaataaggctagtccgttatcaacttgaaaaagtggcaccgagtcggtgcaaatatctgacccagttacgtgcacagactctg

SEQ ID NO: 1283 - RNA, 136 nt, synthetic construct
  source 1..136: mol_type = other RNA
gccccagagtctgtgcacaggttttagagctagaaatagcaagttaaaataaggctagtccgttatcaacttgaaaaagtggcaccgagtcggtgcaaatatctgacccagttacgtgcacagactctgttttttt

SEQ ID NO: 1284 - RNA, 132 nt, synthetic construct
  source 1..132: mol_type = other RNA
gccccagagtctgtgcacaggttttagagctagaaatagcaagttaaaataaggctagtccgttatcaacttgaaaaagtggcaccgagtcggtgccaaagaaatatctgacccagttacgtgcacagactc

SEQ ID NO: 1285 - RNA, 139 nt, synthetic construct
  source 1..139: mol_type = other RNA
gccccagagtctgtgcacaggttttagagctagaaatagcaagttaaaataaggctagtccgttatcaacttgaaaaagtggcaccgagtcggtgccaaagaaatatctgacccagttacgtgcacagactcttttttt

SEQ ID NO: 1286 - RNA, 134 nt, synthetic construct
  source 1..134: mol_type = other RNA
gccccagagtctgtgcacaggttttagagctagaaatagcaagttaaaataaggctagtccgttatcaacttgaaaaagtggcaccgagtcggtgccaaagaaatatctgacccagttacgtgcacagactctg

SEQ ID NO: 1287 - RNA, 141 nt, synthetic construct
  source 1..141: mol_type = other RNA
gccccagagtctgtgcacaggttttagagctagaaatagcaagttaaaataaggctagtccgttatcaacttgaaaaagtggcaccgagtcggtgccaaagaaatatctgacccagttacgtgcacagactctgttttttt

SEQ ID NO: 1288 - RNA, 137 nt, synthetic construct
  source 1..137: mol_type = other RNA
gccccagagtctgtgcacaggttttagagctagaaatagcaagttaaaataaggctagtccgttatcaacttgaaaaagtggcaccgagtcggtgcgggtacaaagaaatatctgacccagttacgtgcacagactc

SEQ ID NO: 1289 - RNA, 144 nt, synthetic construct
  source 1..144: mol_type = other RNA
gccccagagtctgtgcacaggttttagagctagaaatagcaagttaaaataaggctagtccgttatcaacttgaaaaagtggcaccgagtcggtgcgggtacaaagaaatatctgacccagttacgtgcacagactcttttttt

SEQ ID NO: 1290 - RNA, 139 nt, synthetic construct
  source 1..139: mol_type = other RNA
gccccagagtctgtgcacaggttttagagctagaaatagcaagttaaaataaggctagtccgttatcaacttgaaaaagtggcaccgagtcggtgcgggtacaaagaaatatctgacccagttacgtgcacagactctg

SEQ ID NO: 1291 - RNA, 146 nt, synthetic construct
  source 1..146: mol_type = other RNA
gccccagagtctgtgcacaggttttagagctagaaatagcaagttaaaataaggctagtccgttatcaacttgaaaaagtggcaccgagtcggtgcgggtacaaagaaatatctgacccagttacgtgcacagactctgttttttt

SEQ ID NO: 1292 - RNA, 142 nt, synthetic construct
  source 1..142: mol_type = other RNA
gccccagagtctgtgcacaggttttagagctagaaatagcaagttaaaataaggctagtccgttatcaacttgaaaaagtggcaccgagtcggtgcatgatcctgacgacggagaccgccgtcgtcgacaagcctgcacaga

SEQ ID NO: 1293 - RNA, 149 nt, synthetic construct
  source 1..149: mol_type = other RNA
gccccagagtctgtgcacaggttttagagctagaaatagcaagttaaaataaggctagtccgttatcaacttgaaaaagtggcaccgagtcggtgcatgatcctgacgacggagaccgccgtcgtcgacaagcctgcacagattttttt

SEQ ID NO: 1294 - RNA, 143 nt, synthetic construct
  source 1..143: mol_type = other RNA
gccccagagtctgtgcacaggttttagagctagaaatagcaagttaaaataaggctagtccgttatcaacttgaaaaagtggcaccgagtcggtgcatgatcctgacgacggagaccgccgtcgtcgacaagcctgcacagac

SEQ ID NO: 1295 - RNA, 150 nt, synthetic construct
  source 1..150: mol_type = other RNA
gccccagagtctgtgcacaggttttagagctagaaatagcaagttaaaataaggctagtccgttatcaacttgaaaaagtggcaccgagtcggtgcatgatcctgacgacggagaccgccgtcgtcgacaagcctgcacagacttttttt

SEQ ID NO: 1296 - RNA, 145 nt, synthetic construct
  source 1..145: mol_type = other RNA
gccccagagtctgtgcacaggttttagagctagaaatagcaagttaaaataaggctagtccgttatcaacttgaaaaagtggcaccgagtcggtgcatgatcctgacgacggagaccgccgtcgtcgacaagcctgcacagactc

SEQ ID NO: 1297 - RNA, 152 nt, synthetic construct
  source 1..152: mol_type = other RNA
gccccagagtctgtgcacaggttttagagctagaaatagcaagttaaaataaggctagtccgttatcaacttgaaaaagtggcaccgagtcggtgcatgatcctgacgacggagaccgccgtcgtcgacaagcctgcacagactcttttttt

SEQ ID NO: 1298 - RNA, 147 nt, synthetic construct
  source 1..147: mol_type = other RNA
gccccagagtctgtgcacaggttttagagctagaaatagcaagttaaaataaggctagtccgttatcaacttgaaaaagtggcaccgagtcggtgcatgatcctgacgacggagaccgccgtcgtcgacaagcctgcacagactctg

SEQ ID NO: 1299 - RNA, 154 nt, synthetic construct
  source 1..154: mol_type = other RNA
gccccagagtctgtgcacaggttttagagctagaaatagcaagttaaaataaggctagtccgttatcaacttgaaaaagtggcaccgagtcggtgcatgatcctgacgacggagaccgccgtcgtcgacaagcctgcacagactctgttttttt

SEQ ID NO: 1300 - RNA, 148 nt, synthetic construct
  source 1..148: mol_type = other RNA
gccccagagtctgtgcacaggttttagagctagaaatagcaagttaaaataaggctagtccgttatcaacttgaaaaagtggcaccgagtcggtgcatgatcctgacgacggagaccgccgtcgtcgacaagcctgcacagactctgg

SEQ ID NO: 1301 - RNA, 155 nt, synthetic construct
  source 1..155: mol_type = other RNA
gccccagagtctgtgcacaggttttagagctagaaatagcaagttaaaataaggctagtccgttatcaacttgaaaaagtggcaccgagtcggtgcatgatcctgacgacggagaccgccgtcgtcgacaagcctgcacagactctggttttttt

SEQ ID NO: 1302 - RNA, 149 nt, synthetic construct
  source 1..149: mol_type = other RNA
gccccagagtctgtgcacaggttttagagctagaaatagcaagttaaaataaggctagtccgttatcaacttgaaaaagtggcaccgagtcggtgcatgatcctgacgacggagaccgccgtcgtcgacaagcctgcacagactctggg

SEQ ID NO: 1303 - RNA, 156 nt, synthetic construct
  source 1..156: mol_type = other RNA
gccccagagtctgtgcacaggttttagagctagaaatagcaagttaaaataaggctagtccgttatcaacttgaaaaagtggcaccgagtcggtgcatgatcctgacgacggagaccgccgtcgtcgacaagcctgcacagactctgggttttttt

SEQ ID NO: 1304 - RNA, 150 nt, synthetic construct
  source 1..150: mol_type = other RNA
gccccagagtctgtgcacaggttttagagctagaaatagcaagttaaaataaggctagtccgttatcaacttgaaaaagtggcaccgagtcggtgcatgatcctgacgacggagaccgccgtcgtcgacaagcctgcacagactctgggg

SEQ ID NO: 1305 - RNA, 157 nt, synthetic construct
  source 1..157: mol_type = other RNA
gccccagagtctgtgcacaggttttagagctagaaatagcaagttaaaataaggctagtccgttatcaacttgaaaaagtggcaccgagtcggtgcatgatcctgacgacggagaccgccgtcgtcgacaagcctgcacagactctggggttttttt

SEQ ID NO: 1306 - RNA, 151 nt, synthetic construct
  source 1..151: mol_type = other RNA
gccccagagtctgtgcacaggttttagagctagaaatagcaagttaaaataaggctagtccgttatcaacttgaaaaagtggcaccgagtcggtgcatgatcctgacgacggagaccgccgtcgtcgacaagcctgcacagactctggggc

SEQ ID NO: 1307 - RNA, 158 nt, synthetic construct
  source 1..158: mol_type = other RNA
gccccagagtctgtgcacaggttttagagctagaaatagcaagttaaaataaggctagtccgttatcaacttgaaaaagtggcaccgagtcggtgcatgatcctgacgacggagaccgccgtcgtcgacaagcctgcacagactctggggcttttttt

SEQ ID NO: 1308 - RNA, 148 nt, synthetic construct
  source 1..148: mol_type = other RNA
gccccagagtctgtgcacaggtttaagagcggggaaatccgcaagtttaaataaggctagtccgttatcagcgtgaaaacgcggcaccgagtcggtgcatgatcctgacgacggagaccgccgtcgtcgacaagcctgcacagactct

SEQ ID NO: 1309 - RNA, 155 nt, synthetic construct
  source 1..155: mol_type = other RNA
gccccagagtctgtgcacaggtttaagagcggggaaatccgcaagtttaaataaggctagtccgttatcagcgtgaaaacgcggcaccgagtcggtgcatgatcctgacgacggagaccgccgtcgtcgacaagcctgcacagactctttttttt

SEQ ID NO: 1310 - RNA, 189 nt, synthetic construct
  source 1..189: mol_type = other RNA
gccccagagtctgtgcacaggttttagagctagaaatagcaagttaaaataaggctagtccgttatcaacttgaaaaagtggcaccgagtcggtgcatgatcctgacgacggagaccgccgtcgtcgacaagcctgcacagactctcccaatcgcggttctatctagttacgcgttaaaccaactagaa

SEQ ID NO: 1311 - RNA, 196 nt, synthetic construct
  source 1..196: mol_type = other RNA
gccccagagtctgtgcacaggttttagagctagaaatagcaagttaaaataaggctagtccgttatcaacttgaaaaagtggcaccgagtcggtgcatgatcctgacgacggagaccgccgtcgtcgacaagcctgcacagactctcccaatcgcggttctatctagttacgcgttaaaccaactagaattttttt

SEQ ID NO: 1312 - RNA, 189 nt, synthetic construct
  source 1..189: mol_type = other RNA
gccccagagtctgtgcacaggttttagagctagaaatagcaagttaaaataaggctagtccgttatcaacttgaaaaagtggcaccgagtcggtgcatgatcctgacgacggagaccgccgtcgtcgacaagcctgcacagactctccccctcgcggttctatctagttacgcgttaaaccaactagaa

SEQ ID NO: 1313 - RNA, 196 nt, synthetic construct
  source 1..196: mol_type = other RNA
gccccagagtctgtgcacaggttttagagctagaaatagcaagttaaaataaggctagtccgttatcaacttgaaaaagtggcaccgagtcggtgcatgatcctgacgacggagaccgccgtcgtcgacaagcctgcacagactctccccctcgcggttctatctagttacgcgttaaaccaactagaattttttt

SEQ ID NO: 1314 - RNA, 191 nt, synthetic construct
  source 1..191: mol_type = other RNA
gccccagagtctgtgcacaggtttaagagcggggaaatccgcaagtttaaataaggctagtccgttatcagcgtgaaaacgcggcaccgagtcggtgcatgatcctgacgacggagaccgccgtcgtcgacaagcctgcacagactctcctccccgcggttctatctagttacgcgttaaaccaactagaa

SEQ ID NO: 1315 - RNA, 198 nt, synthetic construct
  source 1..198: mol_type = other RNA
gccccagagtctgtgcacaggtttaagagcggggaaatccgcaagtttaaataaggctagtccgttatcagcgtgaaaacgcggcaccgagtcggtgcatgatcctgacgacggagaccgccgtcgtcgacaagcctgcacagactctcctccccgcggttctatctagttacgcgttaaaccaactagaattttttt

SEQ ID NO: 1316 - RNA, 191 nt, synthetic construct
  source 1..191: mol_type = other RNA
gccccagagtctgtgcacaggtttaagagcggggaaatccgcaagtttaaataaggctagtccgttatcagcgtgaaaacgcggcaccgagtcggtgcatgatcctgacgacggagaccgccgtcgtcgacaagcctgcacagactctcctcctcgcggttctatctagttacgcgttaaaccaactagaa

SEQ ID NO: 1317 - RNA, 198 nt, synthetic construct
  source 1..198: mol_type = other RNA
gccccagagtctgtgcacaggtttaagagcggggaaatccgcaagtttaaataaggctagtccgttatcagcgtgaaaacgcggcaccgagtcggtgcatgatcctgacgacggagaccgccgtcgtcgacaagcctgcacagactctcctcctcgcggttctatctagttacgcgttaaaccaactagaattttttt

SEQ ID NO: 1318 - RNA, 148 nt, synthetic construct
  source 1..148: mol_type = other RNA
gccccagagtctgtgcacaggtataagagcggggaaatccgcaagtttatataagactagttcgttatcagcgtgaaaacgcggcaccgagtcggtgcatgatcctgacgacggagaccgccgtcgtcgacaagcctgcacagactct

SEQ ID NO: 1319 - RNA, 155 nt, synthetic construct
  source 1..155: mol_type = other RNA
gccccagagtctgtgcacaggtataagagcggggaaatccgcaagtttatataagactagttcgttatcagcgtgaaaacgcggcaccgagtcggtgcatgatcctgacgacggagaccgccgtcgtcgacaagcctgcacagactctttttttt

SEQ ID NO: 1320 - RNA, 148 nt, synthetic construct
  source 1..148: mol_type = other RNA
gccccagagtctgtgcacaggtataagagcggggaaatccgcatgtttatataagactagttcgttagcagcgtgaaaacgcggcaccgagtcggtgcatgatcctgacgacggagaccgccgtcgtcgacaagcctgcacagactct

SEQ ID NO: 1321 - RNA, 155 nt, synthetic construct
  source 1..155: mol_type = other RNA
gccccagagtctgtgcacaggtataagagcggggaaatccgcatgtttatataagactagttcgttagcagcgtgaaaacgcggcaccgagtcggtgcatgatcctgacgacggagaccgccgtcgtcgacaagcctgcacagactctttttttt

SEQ ID NO: 1322 - RNA, 150 nt, synthetic construct
  source 1..150: mol_type = other RNA
gccccagagtctgtgcacaggttttagagctagaaatagcaagttaaaataaggctagtccgttatcaacttgaaaaagtggcaccgagtcggtgcatgatcctgacgacggagaccgccgtcgtcgacaagcctgcacagactcttttt

SEQ ID NO: 1323 - RNA, 148 nt, synthetic construct
  source 1..148: mol_type = other RNA
gccccagagtctgtgcacaggttttagagctagaaatagcaagttaaaataaggctagtccgttatcaacttgaaaaagtggcaccgagtcggtgcatgatcctgacgacggagaccgccgtcgtcgacaagcctgcacagacttttt

SEQ ID NO: 1324 - RNA, 20 nt, synthetic construct
  source 1..20: mol_type = other RNA
aaacgaccccaaaaggctag

SEQ ID NO: 1325 - RNA, 17 nt, synthetic construct
  source 1..17: mol_type = other RNA
cgaccccaaaaggctag

SEQ ID NO: 1326 - RNA, 18 nt, synthetic construct
  source 1..18: mol_type = other RNA
acgaccccaaaaggctag

SEQ ID NO: 1327 - RNA, 19 nt, synthetic construct
  source 1..19: mol_type = other RNA
aacgaccccaaaaggctag

SEQ ID NO: 1328 - RNA, 21 nt, synthetic construct
  source 1..21: mol_type = other RNA
gaaacgaccccaaaaggctag

SEQ ID NO: 1329 - RNA, 22 nt, synthetic construct
  source 1..22: mol_type = other RNA
tgaaacgaccccaaaaggctag

SEQ ID NO: 1330-1334 - skipped (5 entries)

SEQ ID NO: 1335 - RNA, 10 nt, synthetic construct
  source 1..10: mol_type = other RNA
gccttttggg

SEQ ID NO: 1336 - RNA, 11 nt, synthetic construct
  source 1..11: mol_type = other RNA
gccttttgggg

SEQ ID NO: 1337 - RNA, 12 nt, synthetic construct
  source 1..12: mol_type = other RNA
gccttttggggt

SEQ ID NO: 1338 - RNA, 13 nt, synthetic construct
  source 1..13: mol_type = other RNA
gccttttggggtc

SEQ ID NO: 1339 - RNA, 14 nt, synthetic construct
  source 1..14: mol_type = other RNA
gccttttggggtcg

SEQ ID NO: 1340 - RNA, 15 nt, synthetic construct
  source 1..15: mol_type = other RNA
gccttttggggtcgt

SEQ ID NO: 1341 - RNA, 16 nt, synthetic construct
  source 1..16: mol_type = other RNA
gccttttggggtcgtt

SEQ ID NO: 1342 - RNA, 17 nt, synthetic construct
  source 1..17: mol_type = other RNA
gccttttggggtcgttt

SEQ ID NO: 1343 - RNA, 18 nt, synthetic construct
  source 1..18: mol_type = other RNA
gccttttggggtcgtttc

SEQ ID NO: 1344 - RNA, 19 nt, synthetic construct
  source 1..19: mol_type = other RNA
gccttttggggtcgtttca

SEQ ID NO: 1345 - RNA, 146 nt, synthetic construct
  source 1..146: mol_type = other RNA
aaacgaccccaaaaggctaggttttagagctagaaatagcaagttaaaataaggctagtccgttatcaacttgaaaaagtggcaccgagtcggtgcatgatcctgacgacggagaccgccgtcgtcgacaagccgccttttggggt

SEQ ID NO: 1346 - RNA, 154 nt, synthetic construct
  source 1..154: mol_type = other RNA
gaaacgaccccaaaaggctaggttttagagctagaaatagcaagttaaaataaggctagtccgttatcaacttgaaaaagtggcaccgagtcggtgcatgatcctgacgacggagaccgccgtcgtcgacaagccgccttttggggtttttttt

SEQ ID NO: 1347 - RNA, 144 nt, synthetic construct
  source 1..144: mol_type = other RNA
aaacgaccccaaaaggctaggttttagagctagaaatagcaagttaaaataaggctagtccgttatcaacttgaaaaagtggcaccgagtcggtgcatgatcctgacgacggagaccgccgtcgtcgacaagccgccttttggg

SEQ ID NO: 1348 - RNA, 152 nt, synthetic construct
  source 1..152: mol_type = other RNA
gaaacgaccccaaaaggctaggttttagagctagaaatagcaagttaaaataaggctagtccgttatcaacttgaaaaagtggcaccgagtcggtgcatgatcctgacgacggagaccgccgtcgtcgacaagccgccttttgggttttttt

SEQ ID NO: 1349 - RNA, 150 nt, synthetic construct
  source 1..150: mol_type = other RNA
aaacgaccccaaaaggctaggttttagagctagaaatagcaagttaaaataaggctagtccgttatcaacttgaaaaagtggcaccgagtcggtgcatgatcctgacgacggagaccgccgtcgtcgacaagccgccttttggggttttt

SEQ ID NO: 1350 - RNA, 148 nt, synthetic construct
  source 1..148: mol_type = other RNA
aaacgaccccaaaaggctaggttttagagctagaaatagcaagttaaaataaggctagtccgttatcaacttgaaaaagtggcaccgagtcggtgcatgatcctgacgacggagaccgccgtcgtcgacaagccgccttttgggtttt

SEQ ID NO: 1351 - RNA, 20 nt, synthetic construct
  source 1..20: mol_type = other RNA
ttatttataggagaaataca

SEQ ID NO: 1352 - RNA, 17 nt, synthetic construct
  source 1..17: mol_type = other RNA
tttataggagaaataca

SEQ ID NO: 1353 - RNA, 18 nt, synthetic construct
  source 1..18: mol_type = other RNA
atttataggagaaataca

SEQ ID NO: 1354 - RNA, 19 nt, synthetic construct
  source 1..19: mol_type = other RNA
tatttataggagaaataca

SEQ ID NO: 1355 - RNA, 21 nt, synthetic construct
  source 1..21: mol_type = other RNA
attatttataggagaaataca

SEQ ID NO: 1356 - RNA, 22 nt, synthetic construct
  source 1..22: mol_type = other RNA
aattatttataggagaaataca

SEQ ID NO: 1357-1361 - skipped (5 entries)

SEQ ID NO: 1362 - RNA, 10 nt, synthetic construct
  source 1..10: mol_type = other RNA
atttctccta

SEQ ID NO: 1363 - RNA, 11 nt, synthetic construct
  source 1..11: mol_type = other RNA
atttctcctat

SEQ ID NO: 1364 - RNA, 12 nt, synthetic construct
  source 1..12: mol_type = other RNA
atttctcctata

SEQ ID NO: 1365 - RNA, 13 nt, synthetic construct
  source 1..13: mol_type = other RNA
atttctcctataa

SEQ ID NO: 1366 - RNA, 14 nt, synthetic construct
  source 1..14: mol_type = other RNA
atttctcctataaa

SEQ ID NO: 1367 - RNA, 15 nt, synthetic construct
  source 1..15: mol_type = other RNA
atttctcctataaat

SEQ ID NO: 1368 - RNA, 16 nt, synthetic construct
  source 1..16: mol_type = other RNA
atttctcctataaata

SEQ ID NO: 1369 - RNA, 17 nt, synthetic construct
  source 1..17: mol_type = other RNA
atttctcctataaataa

SEQ ID NO: 1370 - RNA, 18 nt, synthetic construct
  source 1..18: mol_type = other RNA
atttctcctataaataat

SEQ ID NO: 1371 - RNA, 19 nt, synthetic construct
  source 1..19: mol_type = other RNA
atttctcctataaataatt

SEQ ID NO: 1372 - RNA, 146 nt, synthetic construct
  source 1..146: mol_type = other RNA
ttatttataggagaaatacagttttagagctagaaatagcaagttaaaataaggctagtccgttatcaacttgaaaaagtggcaccgagtcggtgcatgatcctgacgacggagaccgccgtcgtcgacaagccatttctcctata

SEQ ID NO: 1373 - RNA, 154 nt, synthetic construct
  source 1..154: mol_type = other RNA
gttatttataggagaaatacagttttagagctagaaatagcaagttaaaataaggctagtccgttatcaacttgaaaaagtggcaccgagtcggtgcatgatcctgacgacggagaccgccgtcgtcgacaagccatttctcctatattttttt

SEQ ID NO: 1374 - RNA, 144 nt, synthetic construct
  source 1..144: mol_type = other RNA
ttatttataggagaaatacagttttagagctagaaatagcaagttaaaataaggctagtccgttatcaacttgaaaaagtggcaccgagtcggtgcatgatcctgacgacggagaccgccgtcgtcgacaagccatttctccta

SEQ ID NO: 1375 - RNA, 153 nt, synthetic construct
  source 1..153: mol_type = other RNA
gttatttataggagaaatacagttttagagctagaaatagcaagttaaaataaggctagtccgttatcaacttgaaaaagtggcaccgagtcggtgcatgatcctgacgacggagaccgccgtcgtcgacaagccatttctcctaattttttt

SEQ ID NO: 1376 - RNA, 150 nt, synthetic construct
  source 1..150: mol_type = other RNA
ttatttataggagaaatacagttttagagctagaaatagcaagttaaaataaggctagtccgttatcaacttgaaaaagtggcaccgagtcggtgcatgatcctgacgacggagaccgccgtcgtcgacaagccatttctcctatatttt

SEQ ID NO: 1377 - RNA, 149 nt, synthetic construct
  source 1..149: mol_type = other RNA
ttatttataggagaaatacagttttagagctagaaatagcaagttaaaataaggctagtccgttatcaacttgaaaaagtggcaccgagtcggtgcatgatcctgacgacggagaccgccgtcgtcgacaagccatttctcctaatttt

SEQ ID NO: 1378 - RNA, 145 nt, synthetic construct
  source 1..145: mol_type = other RNA
ttatttataggagaaatacagttttagagctagaaatagcaagttaaaataaggctagtccgttatcaacttgaaaaagtggcaccgagtcggtgcatgatcctgacgacggagaccgccgtcgtcgacaagccatttctcctaa

SEQ ID NO: 1379 - skipped

SEQ ID NO: 1380 - RNA, 20 nt, synthetic construct
  source 1..20: mol_type = other RNA
gcctgtaattccagcacttt

SEQ ID NO: 1381 - RNA, 17 nt, synthetic construct
  source 1..17: mol_type = other RNA
tgtaattccagcacttt

SEQ ID NO: 1382 - RNA, 18 nt, synthetic construct
  source 1..18: mol_type = other RNA
ctgtaattccagcacttt

SEQ ID NO: 1383 - RNA, 19 nt, synthetic construct
  source 1..19: mol_type = other RNA
cctgtaattccagcacttt

SEQ ID NO: 1384 - RNA, 21 nt, synthetic construct
  source 1..21: mol_type = other RNA
cgcctgtaattccagcacttt

SEQ ID NO: 1385 - RNA, 22 nt, synthetic construct
  source 1..22: mol_type = other RNA
acgcctgtaattccagcacttt

SEQ ID NO: 1386-1390 - skipped (5 entries)

SEQ ID NO: 1391 - RNA, 10 nt, synthetic construct
  source 1..10: mol_type = other RNA
gtgctggaat

SEQ ID NO: 1392 - RNA, 11 nt, synthetic construct
  source 1..11: mol_type = other RNA
gtgctggaatt

SEQ ID NO: 1393 - RNA, 12 nt, synthetic construct
  source 1..12: mol_type = other RNA
gtgctggaatta

SEQ ID NO: 1394 - RNA, 13 nt, synthetic construct
  source 1..13: mol_type = other RNA
gtgctggaattac

SEQ ID NO: 1395 - RNA, 14 nt, synthetic construct
  source 1..14: mol_type = other RNA
gtgctggaattaca

SEQ ID NO: 1396 - RNA, 15 nt, synthetic construct
  source 1..15: mol_type = other RNA
gtgctggaattacag

SEQ ID NO: 1397 - RNA, 16 nt, synthetic construct
  source 1..16: mol_type = other RNA
gtgctggaattacagg

SEQ ID NO: 1398 - RNA, 17 nt, synthetic construct
  source 1..17: mol_type = other RNA
gtgctggaattacaggc

SEQ ID NO: 1399 - RNA, 18 nt, synthetic construct
  source 1..18: mol_type = other RNA
gtgctggaattacaggcg

SEQ ID NO: 1400 - RNA, 19 nt, synthetic construct
  source 1..19: mol_type = other RNA
gtgctggaattacaggcgt

SEQ ID NO: 1401 - RNA, 146 nt, synthetic construct
  source 1..146: mol_type = other RNA
gcctgtaattccagcactttgttttagagctagaaatagcaagttaaaataaggctagtccgttatcaacttgaaaaagtggcaccgagtcggtgcatgatcctgacgacggagaccgccgtcgtcgacaagccgtgctggaatta

SEQ ID NO: 1402 - RNA, 153 nt, synthetic construct
  source 1..153: mol_type = other RNA
gcctgtaattccagcactttgttttagagctagaaatagcaagttaaaataaggctagtccgttatcaacttgaaaaagtggcaccgagtcggtgcatgatcctgacgacggagaccgccgtcgtcgacaagccgtgctggaattattttttt

SEQ ID NO: 1403 - RNA, 144 nt, synthetic construct
  source 1..144: mol_type = other RNA
gcctgtaattccagcactttgttttagagctagaaatagcaagttaaaataaggctagtccgttatcaacttgaaaaagtggcaccgagtcggtgcatgatcctgacgacggagaccgccgtcgtcgacaagccgtgctggaat

SEQ ID NO: 1404 - RNA, 151 nt, synthetic construct
  source 1..151: mol_type = other RNA
gcctgtaattccagcactttgttttagagctagaaatagcaagttaaaataaggctagtccgttatcaacttgaaaaagtggcaccgagtcggtgcatgatcctgacgacggagaccgccgtcgtcgacaagccgtgctggaatttttttt

SEQ ID NO: 1405 - RNA, 20 nt, synthetic construct
  source 1..20: mol_type = other RNA
gggtcaatccaggacagtca

SEQ ID NO: 1406 - RNA, 17 nt, synthetic construct
  source 1..17: mol_type = other RNA
tcaatccaggacagtca

SEQ ID NO: 1407 - RNA, 18 nt, synthetic construct
  source 1..18: mol_type = other RNA
gtcaatccaggacagtca

SEQ ID NO: 1408 - RNA, 19 nt, synthetic construct
  source 1..19: mol_type = other RNA
ggtcaatccaggacagtca

SEQ ID NO: 1409 - RNA, 21 nt, synthetic construct
  source 1..21: mol_type = other RNA
agggtcaatccaggacagtca

SEQ ID NO: 1410 - RNA, 22 nt, synthetic construct
  source 1..22: mol_type = other RNA
tagggtcaatccaggacagtca

SEQ ID NO: 1411-1415 - skipped (5 entries)

SEQ ID NO: 1416 - RNA, 10 nt, synthetic construct
  source 1..10: mol_type = other RNA
ctgtcctgga

SEQ ID NO: 1417 - RNA, 11 nt, synthetic construct
  source 1..11: mol_type = other RNA
ctgtcctggat

SEQ ID NO: 1418 - RNA, 12 nt, synthetic construct
  source 1..12: mol_type = other RNA
ctgtcctggatt

SEQ ID NO: 1419 - RNA, 13 nt, synthetic construct
  source 1..13: mol_type = other RNA
ctgtcctggattg

SEQ ID NO: 1420 - RNA, 14 nt, synthetic construct
  source 1..14: mol_type = other RNA
ctgtcctggattga

SEQ ID NO: 1421 - RNA, 15 nt, synthetic construct
  source 1..15: mol_type = other RNA
ctgtcctggattgac

SEQ ID NO: 1422 - RNA, 16 nt, synthetic construct
  source 1..16: mol_type = other RNA
ctgtcctggattgacc

SEQ ID NO: 1423 - RNA, 17 nt, synthetic construct
  source 1..17: mol_type = other RNA
ctgtcctggattgaccc

SEQ ID NO: 1424 - RNA, 18 nt, synthetic construct
  source 1..18: mol_type = other RNA
ctgtcctggattgaccct

SEQ ID NO: 1425 - RNA, 19 nt, synthetic construct
  source 1..19: mol_type = other RNA
ctgtcctggattgacccta

SEQ ID NO: 1426 - RNA, 146 nt, synthetic construct
  source 1..146: mol_type = other RNA
gggtcaatccaggacagtcagttttagagctagaaatagcaagttaaaataaggctagtccgttatcaacttgaaaaagtggcaccgagtcggtgcatgatcctgacgacggagaccgccgtcgtcgacaagccctgtcctggatt

SEQ ID NO: 1427 - RNA, 153 nt, synthetic construct
  source 1..153: mol_type = other RNA
gggtcaatccaggacagtcagttttagagctagaaatagcaagttaaaataaggctagtccgttatcaacttgaaaaagtggcaccgagtcggtgcatgatcctgacgacggagaccgccgtcgtcgacaagccctgtcctggattttttttt

SEQ ID NO: 1428 - RNA, 144 nt, synthetic construct
  source 1..144: mol_type = other RNA
gggtcaatccaggacagtcagttttagagctagaaatagcaagttaaaataaggctagtccgttatcaacttgaaaaagtggcaccgagtcggtgcatgatcctgacgacggagaccgccgtcgtcgacaagccctgtcctgga

SEQ ID NO: 1429 - RNA, 151 nt, synthetic construct
  source 1..151: mol_type = other RNA
gggtcaatccaggacagtcagttttagagctagaaatagcaagttaaaataaggctagtccgttatcaacttgaaaaagtggcaccgagtcggtgcatgatcctgacgacggagaccgccgtcgtcgacaagccctgtcctggattttttt

SEQ ID NO: 1430 - RNA, 20 nt, synthetic construct
  source 1..20: mol_type = other RNA
ggtctcaaactcctgacctc

SEQ ID NO: 1431 - RNA, 17 nt, synthetic construct
  source 1..17: mol_type = other RNA
ctcaaactcctgacctc

SEQ ID NO: 1432 - RNA, 18 nt, synthetic construct
  source 1..18: mol_type = other RNA
tctcaaactcctgacctc

SEQ ID NO: 1433 - RNA, 19 nt, synthetic construct
  source 1..19: mol_type = other RNA
gtctcaaactcctgacctc

SEQ ID NO: 1434 - RNA, 21 nt, synthetic construct
  source 1..21: mol_type = other RNA
tggtctcaaactcctgacctc

SEQ ID NO: 1435 - RNA, 22 nt, synthetic construct
  source 1..22: mol_type = other RNA
ctggtctcaaactcctgacctc

SEQ ID NO: 1436-1440 - skipped (5 entries)

SEQ ID NO: 1441 - RNA, 10 nt, synthetic construct
  source 1..10: mol_type = other RNA
gtcaggagtt

SEQ ID NO: 1442 - RNA, 11 nt, synthetic construct
  source 1..11: mol_type = other RNA
gtcaggagttt

SEQ ID NO: 1443 - RNA, 12 nt, synthetic construct
  source 1..12: mol_type = other RNA
gtcaggagtttg

SEQ ID NO: 1444 - RNA, 13 nt, synthetic construct
  source 1..13: mol_type = other RNA
gtcaggagtttga

SEQ ID NO: 1445 - RNA, 14 nt, synthetic construct
  source 1..14: mol_type = other RNA
gtcaggagtttgag

SEQ ID NO: 1446 - RNA, 15 nt, synthetic construct
  source 1..15: mol_type = other RNA
gtcaggagtttgaga

SEQ ID NO: 1447 - RNA, 16 nt, synthetic construct
  source 1..16: mol_type = other RNA
gtcaggagtttgagac

SEQ ID NO: 1448 - RNA, 17 nt, synthetic construct
  source 1..17: mol_type = other RNA
gtcaggagtttgagacc

SEQ ID NO: 1449 - RNA, 18 nt, synthetic construct
  source 1..18: mol_type = other RNA
gtcaggagtttgagacca

SEQ ID NO: 1450 - RNA, 19 nt, synthetic construct
  source 1..19: mol_type = other RNA
gtcaggagtttgagaccag

SEQ ID NO: 1451 - RNA, 146 nt, synthetic construct
  source 1..146: mol_type = other RNA
ggtctcaaactcctgacctcgttttagagctagaaatagcaagttaaaataaggctagtccgttatcaacttgaaaaagtggcaccgagtcggtgcatgatcctgacgacggagaccgccgtcgtcgacaagccgtcaggagtttg

SEQ ID NO: 1452 - RNA, 153 nt, synthetic construct
  source 1..153: mol_type = other RNA
ggtctcaaactcctgacctcgttttagagctagaaatagcaagttaaaataaggctagtccgttatcaacttgaaaaagtggcaccgagtcggtgcatgatcctgacgacggagaccgccgtcgtcgacaagccgtcaggagtttgttttttt

SEQ ID NO: 1453 - RNA, 144 nt, synthetic construct
  source 1..144: mol_type = other RNA
ggtctcaaactcctgacctcgttttagagctagaaatagcaagttaaaataaggctagtccgttatcaacttgaaaaagtggcaccgagtcggtgcatgatcctgacgacggagaccgccgtcgtcgacaagccgtcaggagtt

SEQ ID NO: 1454 - RNA, 151 nt, synthetic construct
  source 1..151: mol_type = other RNA
ggtctcaaactcctgacctcgttttagagctagaaatagcaagttaaaataaggctagtccgttatcaacttgaaaaagtggcaccgagtcggtgcatgatcctgacgacggagaccgccgtcgtcgacaagccgtcaggagttttttttt

SEQ ID NO: 1455 - RNA, 20 nt, synthetic construct
  source 1..20: mol_type = other RNA
tcatgggagtgaaactagtt

SEQ ID NO: 1456 - RNA, 17 nt, synthetic construct
  source 1..17: mol_type = other RNA
tgggagtgaaactagtt

SEQ ID NO: 1457 - RNA, 18 nt, synthetic construct
  source 1..18: mol_type = other RNA
atgggagtgaaactagtt

SEQ ID NO: 1458 - RNA, 19 nt, synthetic construct
  source 1..19: mol_type = other RNA
catgggagtgaaactagtt

SEQ ID NO: 1459 - RNA, 21 nt, synthetic construct
  source 1..21: mol_type = other RNA
atcatgggagtgaaactagtt

SEQ ID NO: 1460 - RNA, 22 nt, synthetic construct
  source 1..22: mol_type = other RNA
tatcatgggagtgaaactagtt

SEQ ID NO: 1461-1465 - skipped (5 entries)

SEQ ID NO: 1466 - RNA, 10 nt, synthetic construct
  source 1..10: mol_type = other RNA
tagtttcact

SEQ ID NO: 1467 - RNA, 11 nt, synthetic construct
  source 1..11: mol_type = other RNA
tagtttcactc

SEQ ID NO: 1468 - RNA, 12 nt, synthetic construct
  source 1..12: mol_type = other RNA
tagtttcactcc

SEQ ID NO: 1469 - RNA, 13 nt, synthetic construct
  source 1..13: mol_type = other RNA
tagtttcactccc

SEQ ID NO: 1470 - RNA, 14 nt, synthetic construct
  source 1..14: mol_type = other RNA
tagtttcactccca

SEQ ID NO: 1471 - RNA, 15 nt, synthetic construct
  source 1..15: mol_type = other RNA
tagtttcactcccat

SEQ ID NO: 1472 - RNA, 16 nt, synthetic construct
  source 1..16: mol_type = other RNA
tagtttcactcccatg

SEQ ID NO: 1473 - RNA, 17 nt, synthetic construct
  source 1..17: mol_type = other RNA
tagtttcactcccatga

SEQ ID NO: 1474 - RNA, 18 nt, synthetic construct
  source 1..18: mol_type = other RNA
tagtttcactcccatgat

SEQ ID NO: 1475 - RNA, 19 nt, synthetic construct
  source 1..19: mol_type = other RNA
tagtttcactcccatgata

SEQ ID NO: 1476 - RNA, 146 nt, synthetic construct
  source 1..146: mol_type = other RNA
tcatgggagtgaaactagttgttttagagctagaaatagcaagttaaaataaggctagtccgttatcaacttgaaaaagtggcaccgagtcggtgcatgatcctgacgacggagaccgccgtcgtcgacaagcctagtttcactcc

SEQ ID NO: 1477 - RNA, 154 nt, synthetic construct
  source 1..154: mol_type = other RNA
gtcatgggagtgaaactagttgttttagagctagaaatagcaagttaaaataaggctagtccgttatcaacttgaaaaagtggcaccgagtcggtgcatgatcctgacgacggagaccgccgtcgtcgacaagcctagtttcactccttttttt

SEQ ID NO: 1478 - RNA, 144 nt, synthetic construct
  source 1..144: mol_type = other RNA
tcatgggagtgaaactagttgttttagagctagaaatagcaagttaaaataaggctagtccgttatcaacttgaaaaagtggcaccgagtcggtgcatgatcctgacgacggagaccgccgtcgtcgacaagcctagtttcact

SEQ ID NO: 1479 - RNA, 152 nt, synthetic construct
  source 1..152: mol_type = other RNA
gtcatgggagtgaaactagttgttttagagctagaaatagcaagttaaaataaggctagtccgttatcaacttgaaaaagtggcaccgagtcggtgcatgatcctgacgacggagaccgccgtcgtcgacaagcctagtttcactttttttt

SEQ ID NO: 1480 - RNA, 20 nt, synthetic construct
  source 1..20: mol_type = other RNA
tgtggcagtattgagaggtg

SEQ ID NO: 1481 - RNA, 17 nt, synthetic construct
  source 1..17: mol_type = other RNA
ggcagtattgagaggtg

SEQ ID NO: 1482 - RNA, 18 nt, synthetic construct
  source 1..18: mol_type = other RNA
tggcagtattgagaggtg

SEQ ID NO: 1483 - RNA, 19 nt, synthetic construct
  source 1..19: mol_type = other RNA
gtggcagtattgagaggtg

SEQ ID NO: 1484 - RNA, 21 nt, synthetic construct
  source 1..21: mol_type = other RNA
atgtggcagtattgagaggtg

SEQ ID NO: 1485 - RNA, 22 nt, synthetic construct
  source 1..22: mol_type = other RNA
gatgtggcagtattgagaggtg

SEQ ID NO: 1486-1490 - skipped (5 entries)

SEQ ID NO: 1491 - RNA, 10 nt, synthetic construct
  source 1..10: mol_type = other RNA
ctctcaatac

SEQ ID NO: 1492 - RNA, 11 nt, synthetic construct
  source 1..11: mol_type = other RNA
ctctcaatact

SEQ ID NO: 1493 - RNA, 12 nt, synthetic construct
  source 1..12: mol_type = other RNA
ctctcaatactg

SEQ ID NO: 1494 - RNA, 13 nt, synthetic construct
  source 1..13: mol_type = other RNA
ctctcaatactgc

SEQ ID NO: 1495 - RNA, 14 nt, synthetic construct
  source 1..14: mol_type = other RNA
ctctcaatactgcc

SEQ ID NO: 1496 - RNA, 15 nt, synthetic construct
  source 1..15: mol_type = other RNA
ctctcaatactgcca

SEQ ID NO: 1497 - RNA, 16 nt, synthetic construct
  source 1..16: mol_type = other RNA
ctctcaatactgccac

SEQ ID NO: 1498 - RNA, 17 nt, synthetic construct
  source 1..17: mol_type = other RNA
ctctcaatactgccaca

SEQ ID NO: 1499 - RNA, 18 nt, synthetic construct
  source 1..18: mol_type = other RNA
ctctcaatactgccacat

SEQ ID NO: 1500 - RNA, 19 nt, synthetic construct
  source 1..19: mol_type = other RNA
ctctcaatactgccacatc

SEQ ID NO: 1501 - RNA, 146 nt, synthetic construct
  source 1..146: mol_type = other RNA
tgtggcagtattgagaggtggttttagagctagaaatagcaagttaaaataaggctagtccgttatcaacttgaaaaagtggcaccgagtcggtgcatgatcctgacgacggagaccgccgtcgtcgacaagccctctcaatactg

SEQ ID NO: 1502 - RNA, 154 nt, synthetic construct
  source 1..154: mol_type = other RNA
gtgtggcagtattgagaggtggttttagagctagaaatagcaagttaaaataaggctagtccgttatcaacttgaaaaagtggcaccgagtcggtgcatgatcctgacgacggagaccgccgtcgtcgacaagccctctcaatactgttttttt

SEQ ID NO: 1503 - RNA, 144 nt, synthetic construct
  source 1..144: mol_type = other RNA
tgtggcagtattgagaggtggttttagagctagaaatagcaagttaaaataaggctagtccgttatcaacttgaaaaagtggcaccgagtcggtgcatgatcctgacgacggagaccgccgtcgtcgacaagccctctcaatac

SEQ ID NO: 1504 - RNA, 152 nt, synthetic construct
  source 1..152: mol_type = other RNA
gtgtggcagtattgagaggtggttttagagctagaaatagcaagttaaaataaggctagtccgttatcaacttgaaaaagtggcaccgagtcggtgcatgatcctgacgacggagaccgccgtcgtcgacaagccctctcaatacttttttt

SEQ ID NO: 1505 - RNA, 20 nt, synthetic construct
  source 1..20: mol_type = other RNA
gtcttgtccctctaggaaaa

SEQ ID NO: 1506 - RNA, 17 nt, synthetic construct
  source 1..17: mol_type = other RNA
ttgtccctctaggaaaa

SEQ ID NO: 1507 - RNA, 18 nt, synthetic construct
  source 1..18: mol_type = other RNA
cttgtccctctaggaaaa

SEQ ID NO: 1508 - RNA, 19 nt, synthetic construct
  source 1..19: mol_type = other RNA
tcttgtccctctaggaaaa

SEQ ID NO: 1509 - RNA, 21 nt, synthetic construct
  source 1..21: mol_type = other RNA
ggtcttgtccctctaggaaaa

SEQ ID NO: 1510 - RNA, 22 nt, synthetic construct
  source 1..22: mol_type = other RNA
tggtcttgtccctctaggaaaa

SEQ ID NO: 1511-1513 - skipped (3 entries)

SEQ ID NO: 1514 - RNA, 10 nt, synthetic construct
  source 1..10: mol_type = other RNA
tcctagaggg

SEQ ID NO: 1515 - RNA, 11 nt, synthetic construct
  source 1..11: mol_type = other RNA
tcctagaggga

SEQ ID NO: 1516 - RNA, 12 nt, synthetic construct
  source 1..12: mol_type = other RNA
tcctagagggac

SEQ ID NO: 1517 - RNA, 13 nt, synthetic construct
  source 1..13: mol_type = other RNA
tcctagagggaca

SEQ ID NO: 1518 - RNA, 14 nt, synthetic construct
  source 1..14: mol_type = other RNA
tcctagagggacaa

SEQ ID NO: 1519 - RNA, 15 nt, synthetic construct
  source 1..15: mol_type = other RNA
tcctagagggacaag

SEQ ID NO: 1520 - RNA, 16 nt, synthetic construct
  source 1..16: mol_type = other RNA
tcctagagggacaaga

SEQ ID NO: 1521 - RNA, 17 nt, synthetic construct
  source 1..17: mol_type = other RNA
tcctagagggacaagac

SEQ ID NO: 1522 - RNA, 18 nt, synthetic construct
  source 1..18: mol_type = other RNA
tcctagagggacaagacc

SEQ ID NO: 1523 - RNA, 19 nt, synthetic construct
  source 1..19: mol_type = other RNA
tcctagagggacaagacca

SEQ ID NO: 1524 - RNA, 146 nt, synthetic construct
  source 1..146: mol_type = other RNA
gtcttgtccctctaggaaaagttttagagctagaaatagcaagttaaaataaggctagtccgttatcaacttgaaaaagtggcaccgagtcggtgcatgatcctgacgacggagaccgccgtcgtcgacaagcctcctagagggac

SEQ ID NO: 1525 - RNA, 153 nt, synthetic construct
  source 1..153: mol_type = other RNA
gtcttgtccctctaggaaaagttttagagctagaaatagcaagttaaaataaggctagtccgttatcaacttgaaaaagtggcaccgagtcggtgcatgatcctgacgacggagaccgccgtcgtcgacaagcctcctagagggacttttttt

SEQ ID NO: 1526 - RNA, 144 nt, synthetic construct
  source 1..144: mol_type = other RNA
gtcttgtccctctaggaaaagttttagagctagaaatagcaagttaaaataaggctagtccgttatcaacttgaaaaagtggcaccgagtcggtgcatgatcctgacgacggagaccgccgtcgtcgacaagcctcctagaggg

SEQ ID NO: 1527 - RNA, 151 nt, synthetic construct
  source 1..151: mol_type = other RNA
gtcttgtccctctaggaaaagttttagagctagaaatagcaagttaaaataaggctagtccgttatcaacttgaaaaagtggcaccgagtcggtgcatgatcctgacgacggagaccgccgtcgtcgacaagcctcctagagggttttttt

SEQ ID NO: 1528 - RNA, 20 nt, synthetic construct
  source 1..20: mol_type = other RNA
ttgttaggcctaaagccaaa

SEQ ID NO: 1529 - RNA, 17 nt, synthetic construct
  source 1..17: mol_type = other RNA
ttaggcctaaagccaaa

SEQ ID NO: 1530 - RNA, 18 nt, synthetic construct
  source 1..18: mol_type = other RNA
gttaggcctaaagccaaa

SEQ ID NO: 1531 - RNA, 19 nt, synthetic construct
  source 1..19: mol_type = other RNA
tgttaggcctaaagccaaa

SEQ ID NO: 1532 - RNA, 21 nt, synthetic construct
  source 1..21: mol_type = other RNA
cttgttaggcctaaagccaaa

SEQ ID NO: 1533 - RNA, 22 nt, synthetic construct
  source 1..22: mol_type = other RNA
gcttgttaggcctaaagccaaa

SEQ ID NO: 1534-1538 - skipped (5 entries)

SEQ ID NO: 1539 - RNA, 10 nt, synthetic construct
  source 1..10: mol_type = other RNA
ggctttaggc

SEQ ID NO: 1540 - RNA, 11 nt, synthetic construct
  source 1..11: mol_type = other RNA
ggctttaggcc

SEQ ID NO: 1541 - RNA, 12 nt, synthetic construct
  source 1..12: mol_type = other RNA
ggctttaggcct

SEQ ID NO: 1542 - RNA, 13 nt, synthetic construct
  source 1..13: mol_type = other RNA
ggctttaggccta

SEQ ID NO: 1543 - RNA, 14 nt, synthetic construct
  source 1..14: mol_type = other RNA
ggctttaggcctaa

SEQ ID NO: 1544 - RNA, 15 nt, synthetic construct
  source 1..15: mol_type = other RNA
ggctttaggcctaac

SEQ ID NO: 1545 - RNA, 16 nt, synthetic construct
  source 1..16: mol_type = other RNA
ggctttaggcctaaca

SEQ ID NO: 1546 - RNA, 17 nt, synthetic construct
  source 1..17: mol_type = other RNA
ggctttaggcctaacaa

SEQ ID NO: 1547 - RNA, 18 nt, synthetic construct
  source 1..18: mol_type = other RNA
ggctttaggcctaacaag

SEQ ID NO: 1548 - RNA, 19 nt, synthetic construct
  source 1..19: mol_type = other RNA
ggctttaggcctaacaagc

SEQ ID NO: 1549 - RNA, 146 nt, synthetic construct
  source 1..146: mol_type = other RNA
ttgttaggcctaaagccaaagttttagagctagaaatagcaagttaaaataaggctagtccgttatcaacttgaaaaagtggcaccgagtcggtgcatgatcctgacgacggagaccgccgtcgtcgacaagccggctttaggcct

SEQ ID NO: 1550 - RNA, 154 nt, synthetic construct
  source 1..154: mol_type = other RNA
gttgttaggcctaaagccaaagttttagagctagaaatagcaagttaaaataaggctagtccgttatcaacttgaaaaagtggcaccgagtcggtgcatgatcctgacgacggagaccgccgtcgtcgacaagccggctttaggcctttttttt

SEQ ID NO: 1551 - RNA, 144 nt, synthetic construct
  source 1..144: mol_type = other RNA
ttgttaggcctaaagccaaagttttagagctagaaatagcaagttaaaataaggctagtccgttatcaacttgaaaaagtggcaccgagtcggtgcatgatcctgacgacggagaccgccgtcgtcgacaagccggctttaggc

SEQ ID NO: 1552 - RNA, 152 nt, synthetic construct
  source 1..152: mol_type = other RNA
gttgttaggcctaaagccaaagttttagagctagaaatagcaagttaaaataaggctagtccgttatcaacttgaaaaagtggcaccgagtcggtgcatgatcctgacgacggagaccgccgtcgtcgacaagccggctttaggcttttttt

SEQ ID NO: 1553 - RNA, 20 nt, synthetic construct
  source 1..20: mol_type = other RNA
cagtgatggggtgaagacaa

SEQ ID NO: 1554 - RNA, 17 nt, synthetic construct
  source 1..17: mol_type = other RNA
tgatggggtgaagacaa

SEQ ID NO: 1555 - RNA, 18 nt, synthetic construct
  source 1..18: mol_type = other RNA
gtgatggggtgaagacaa

SEQ ID NO: 1556 - RNA, 19 nt, synthetic construct
  source 1..19: mol_type = other RNA
agtgatggggtgaagacaa

SEQ ID NO: 1557 - RNA, 21 nt, synthetic construct
  source 1..21: mol_type = other RNA
gcagtgatggggtgaagacaa

SEQ ID NO: 1558 - RNA, 22 nt, synthetic construct
  source 1..22: mol_type = other RNA
ggcagtgatggggtgaagacaa

SEQ ID NO: 1559-1563 - skipped (5 entries)

SEQ ID NO: 1564 - RNA, 10 nt, synthetic construct
  source 1..10: mol_type = other RNA
tcttcacccc

SEQ ID NO: 1565 - RNA, 11 nt, synthetic construct
  source 1..11: mol_type = other RNA
tcttcacccca

SEQ ID NO: 1566 - RNA, 12 nt, synthetic construct
  source 1..12: mol_type = other RNA
tcttcaccccat

SEQ ID NO: 1567 - RNA, 13 nt, synthetic construct
  source 1..13: mol_type = other RNA
tcttcaccccatc

SEQ ID NO: 1568 - RNA, 14 nt, synthetic construct
  source 1..14: mol_type = other RNA
tcttcaccccatca

SEQ ID NO: 1569 - RNA, 15 nt, synthetic construct
  source 1..15: mol_type = other RNA
tcttcaccccatcac

SEQ ID NO: 1570 - RNA, 16 nt, synthetic construct
  source 1..16: mol_type = other RNA
tcttcaccccatcact

SEQ ID NO: 1571 - RNA, 17 nt, synthetic construct
  source 1..17: mol_type = other RNA
tcttcaccccatcactg

SEQ ID NO: 1572 - RNA, 18 nt, synthetic construct
  source 1..18: mol_type = other RNA
tcttcaccccatcactgc

SEQ ID NO: 1573 - RNA, 19 nt, synthetic construct
  source 1..19: mol_type = other RNA
tcttcaccccatcactgcc

SEQ ID NO: 1574 - RNA, 146 nt, synthetic construct
  source 1..146: mol_type = other RNA
cagtgatggggtgaagacaagttttagagctagaaatagcaagttaaaataaggctagtccgttatcaacttgaaaaagtggcaccgagtcggtgcatgatcctgacgacggagaccgccgtcgtcgacaagcctcttcaccccat

SEQ ID NO: 1575 - RNA, 154 nt, synthetic construct
  source 1..154: mol_type = other RNA
gcagtgatggggtgaagacaagttttagagctagaaatagcaagttaaaataaggctagtccgttatcaacttgaaaaagtggcaccgagtcggtgcatgatcctgacgacggagaccgccgtcgtcgacaagcctcttcaccccatttttttt

SEQ ID NO: 1576 - RNA, 144 nt, synthetic construct
  source 1..144: mol_type = other RNA
cagtgatggggtgaagacaagttttagagctagaaatagcaagttaaaataaggctagtccgttatcaacttgaaaaagtggcaccgagtcggtgcatgatcctgacgacggagaccgccgtcgtcgacaagcctcttcacccc

SEQ ID NO: 1577 - RNA, 152 nt, synthetic construct
  source 1..152: mol_type = other RNA
gcagtgatggggtgaagacaagttttagagctagaaatagcaagttaaaataaggctagtccgttatcaacttgaaaaagtggcaccgagtcggtgcatgatcctgacgacggagaccgccgtcgtcgacaagcctcttcaccccttttttt

SEQ ID NO: 1578 - RNA, 20 nt, synthetic construct
  source 1..20: mol_type = other RNA
ttctgagaaattcacctgaa

SEQ ID NO: 1579 - RNA, 17 nt, synthetic construct
  source 1..17: mol_type = other RNA
tgagaaattcacctgaa

SEQ ID NO: 1580 - RNA, 18 nt, synthetic construct
  source 1..18: mol_type = other RNA
ctgagaaattcacctgaa

SEQ ID NO: 1581 - RNA, 19 nt, synthetic construct
  source 1..19: mol_type = other RNA
tctgagaaattcacctgaa

SEQ ID NO: 1582 - RNA, 21 nt, synthetic construct
  source 1..21: mol_type = other RNA
attctgagaaattcacctgaa

SEQ ID NO: 1583 - RNA, 22 nt, synthetic construct
  source 1..22: mol_type = other RNA
cattctgagaaattcacctgaa

SEQ ID NO: 1584-1588 - skipped (5 entries)

SEQ ID NO: 1589 - RNA, 10 nt, synthetic construct
  source 1..10: mol_type = other RNA
aggtgaattt

SEQ ID NO: 1590 - RNA, 11 nt, synthetic construct
  source 1..11: mol_type = other RNA
aggtgaatttc

SEQ ID NO: 1591 - RNA, 12 nt, synthetic construct
  source 1..12: mol_type = other RNA
aggtgaatttct

SEQ ID NO: 1592 - RNA, 13 nt, synthetic construct
  source 1..13: mol_type = other RNA
aggtgaatttctc

SEQ ID NO: 1593 - RNA, 14 nt, synthetic construct
  source 1..14: mol_type = other RNA
aggtgaatttctca

SEQ ID NO: 1594 - RNA, 15 nt, synthetic construct
  source 1..15: mol_type = other RNA
aggtgaatttctcag

SEQ ID NO: 1595 - RNA, 16 nt, synthetic construct
  source 1..16: mol_type = other RNA
aggtgaatttctcaga

SEQ ID NO: 1596 - RNA, 17 nt, synthetic construct
  source 1..17: mol_type = other RNA
aggtgaatttctcagaa

SEQ ID NO: 1597 - RNA, 18 nt, synthetic construct
  source 1..18: mol_type = other RNA
aggtgaatttctcagaat

SEQ ID NO: 1598 - RNA, 19 nt, synthetic construct
  source 1..19: mol_type = other RNA
aggtgaatttctcagaatg

SEQ ID NO: 1599 - RNA, 146 nt, synthetic construct
  source 1..146: mol_type = other RNA
ttctgagaaattcacctgaagttttagagctagaaatagcaagttaaaataaggctagtccgttatcaacttgaaaaagtggcaccgagtcggtgcatgatcctgacgacggagaccgccgtcgtcgacaagccaggtgaatttct

SEQ ID NO: 1600 - RNA, 154 nt, synthetic construct
  source 1..154: mol_type = other RNA
gttctgagaaattcacctgaagttttagagctagaaatagcaagttaaaataaggctagtccgttatcaacttgaaaaagtggcaccgagtcggtgcatgatcctgacgacggagaccgccgtcgtcgacaagccaggtgaatttctttttttt

SEQ ID NO: 1601 - RNA, 144 nt, synthetic construct
  source 1..144: mol_type = other RNA
ttctgagaaattcacctgaagttttagagctagaaatagcaagttaaaataaggctagtccgttatcaacttgaaaaagtggcaccgagtcggtgcatgatcctgacgacggagaccgccgtcgtcgacaagccaggtgaattt

SEQ ID NO: 1602 - RNA, 152 nt, synthetic construct
  source 1..152: mol_type = other RNA
gttctgagaaattcacctgaagttttagagctagaaatagcaagttaaaataaggctagtccgttatcaacttgaaaaagtggcaccgagtcggtgcatgatcctgacgacggagaccgccgtcgtcgacaagccaggtgaatttttttttt

SEQ ID NO: 1603 - RNA, 20 nt, synthetic construct
  source 1..20: mol_type = other RNA
ggagcccagctttccttccc

SEQ ID NO: 1604 - RNA, 17 nt, synthetic construct
  source 1..17: mol_type = other RNA
gcccagctttccttccc

SEQ ID NO: 1605 - RNA, 18 nt, synthetic construct
  source 1..18: mol_type = other RNA
agcccagctttccttccc

SEQ ID NO: 1606 - RNA, 19 nt, synthetic construct
  source 1..19: mol_type = other RNA
gagcccagctttccttccc

SEQ ID NO: 1607 - RNA, 21 nt, synthetic construct
  source 1..21: mol_type = other RNA
gggagcccagctttccttccc

SEQ ID NO: 1608 - RNA, 22 nt, synthetic construct
  source 1..22: mol_type = other RNA
agggagcccagctttccttccc

SEQ ID NO: 1609-1613 - skipped (5 entries)

SEQ ID NO: 1614 - RNA, 10 nt, synthetic construct
  source 1..10: mol_type = other RNA
aaggaaagct

SEQ ID NO: 1615 - RNA, 11 nt, synthetic construct
  source 1..11: mol_type = other RNA
aaggaaagctg

SEQ ID NO: 1616 - RNA, 12 nt, synthetic construct
  source 1..12: mol_type = other RNA
aaggaaagctgg

SEQ ID NO: 1617 - RNA, 13 nt, synthetic construct
  source 1..13: mol_type = other RNA
aaggaaagctggg

SEQ ID NO: 1618 - RNA, 14 nt, synthetic construct
  source 1..14: mol_type = other RNA
aaggaaagctgggc

SEQ ID NO: 1619 - RNA, 15 nt, synthetic construct
  source 1..15: mol_type = other RNA
aaggaaagctgggct

SEQ ID NO: 1620 - RNA, 16 nt, synthetic construct
  source 1..16: mol_type = other RNA
aaggaaagctgggctc

SEQ ID NO: 1621 - RNA, 17 nt, synthetic construct
  source 1..17: mol_type = other RNA
aaggaaagctgggctcc

SEQ ID NO: 1622 - RNA, 18 nt, synthetic construct
  source 1..18: mol_type = other RNA
aaggaaagctgggctccc

SEQ ID NO: 1623 - RNA, 19 nt, synthetic construct
  source 1..19: mol_type = other RNA
aaggaaagctgggctccct

SEQ ID NO: 1624 - RNA, 146 nt, synthetic construct
  source 1..146: mol_type = other RNA
ggagcccagctttccttcccgttttagagctagaaatagcaagttaaaataaggctagtccgttatcaacttgaaaaagtggcaccgagtcggtgcatgatcctgacgacggagaccgccgtcgtcgacaagccaaggaaagctgg

SEQ ID NO: 1625 - RNA, 153 nt, synthetic construct
  source 1..153: mol_type = other RNA
ggagcccagctttccttcccgttttagagctagaaatagcaagttaaaataaggctagtccgttatcaacttgaaaaagtggcaccgagtcggtgcatgatcctgacgacggagaccgccgtcgtcgacaagccaaggaaagctggttttttt

SEQ ID NO: 1626 - RNA, 144 nt, synthetic construct
  source 1..144: mol_type = other RNA
ggagcccagctttccttcccgttttagagctagaaatagcaagttaaaataaggctagtccgttatcaacttgaaaaagtggcaccgagtcggtgcatgatcctgacgacggagaccgccgtcgtcgacaagccaaggaaagct

SEQ ID NO: 1627 - RNA, 151 nt, synthetic construct
  source 1..151: mol_type = other RNA
ggagcccagctttccttcccgttttagagctagaaatagcaagttaaaataaggctagtccgttatcaacttgaaaaagtggcaccgagtcggtgcatgatcctgacgacggagaccgccgtcgtcgacaagccaaggaaagctttttttt

SEQ ID NO: 1628 - RNA, 20 nt, synthetic construct
  source 1..20: mol_type = other RNA
gaggcaaagcttggaggtca

SEQ ID NO: 1629 - RNA, 17 nt, synthetic construct
  source 1..17: mol_type = other RNA
gcaaagcttggaggtca

SEQ ID NO: 1630 - RNA, 18 nt, synthetic construct
  source 1..18: mol_type = other RNA
ggcaaagcttggaggtca

SEQ ID NO: 1631 - RNA, 19 nt, synthetic construct
  source 1..19: mol_type = other RNA
aggcaaagcttggaggtca

SEQ ID NO: 1632 - RNA, 21 nt, synthetic construct
  source 1..21: mol_type = other RNA
ggaggcaaagcttggaggtca

SEQ ID NO: 1633 - RNA, 22 nt, synthetic construct
  source 1..22: mol_type = other RNA
gggaggcaaagcttggaggtca

SEQ ID NO: 1634-1638 - skipped (5 entries)

SEQ ID NO: 1639 - RNA, 10 nt, synthetic construct
  source 1..10: mol_type = other RNA
cctccaagct

SEQ ID NO: 1640 - RNA, 11 nt, synthetic construct
  source 1..11: mol_type = other RNA
cctccaagctt

SEQ ID NO: 1641 - RNA, 12 nt, synthetic construct
  source 1..12: mol_type = other RNA
cctccaagcttt

SEQ ID NO: 1642 - RNA, 13 nt, synthetic construct
  source 1..13: mol_type = other RNA
cctccaagctttg

SEQ ID NO: 1643 - RNA, 14 nt, synthetic construct
  source 1..14: mol_type = other RNA
cctccaagctttgc

SEQ ID NO: 1644 - RNA, 15 nt, synthetic construct
  source 1..15: mol_type = other RNA
cctccaagctttgcc

SEQ ID NO: 1645 - RNA, 16 nt, synthetic construct
  source 1..16: mol_type = other RNA
cctccaagctttgcct

SEQ ID NO: 1646 - RNA, 17 nt, synthetic construct
  source 1..17: mol_type = other RNA
cctccaagctttgcctc

SEQ ID NO: 1647 - RNA, 18 nt, synthetic construct
  source 1..18: mol_type = other RNA
cctccaagctttgcctcc

SEQ ID NO: 1648 - RNA, 19 nt, synthetic construct
  source 1..19: mol_type = other RNA
cctccaagctttgcctccc

SEQ ID NO: 1649 - RNA, 146 nt, synthetic construct
  source 1..146: mol_type = other RNA
gaggcaaagcttggaggtcagttttagagctagaaatagcaagttaaaataaggctagtccgttatcaacttgaaaaagtggcaccgagtcggtgcatgatcctgacgacggagaccgccgtcgtcgacaagcccctccaagcttt

SEQ ID NO: 1650 - RNA, 153 nt, synthetic construct
  source 1..153: mol_type = other RNA
gaggcaaagcttggaggtcagttttagagctagaaatagcaagttaaaataaggctagtccgttatcaacttgaaaaagtggcaccgagtcggtgcatgatcctgacgacggagaccgccgtcgtcgacaagcccctccaagctttttttttt

SEQ ID NO: 1651 - RNA, 144 nt, synthetic construct
  source 1..144: mol_type = other RNA
gaggcaaagcttggaggtcagttttagagctagaaatagcaagttaaaataaggctagtccgttatcaacttgaaaaagtggcaccgagtcggtgcatgatcctgacgacggagaccgccgtcgtcgacaagcccctccaagct

SEQ ID NO: 1652 - RNA, 151 nt, synthetic construct
  source 1..151: mol_type = other RNA
gaggcaaagcttggaggtcagttttagagctagaaatagcaagttaaaataaggctagtccgttatcaacttgaaaaagtggcaccgagtcggtgcatgatcctgacgacggagaccgccgtcgtcgacaagcccctccaagctttttttt

SEQ ID NO: 1653 - RNA, 20 nt, synthetic construct
  source 1..20: mol_type = other RNA
agtttactcctctgaaggaa

SEQ ID NO: 1654 - RNA, 17 nt, synthetic construct
  source 1..17: mol_type = other RNA
ttactcctctgaaggaa

SEQ ID NO: 1655 - RNA, 18 nt, synthetic construct
  source 1..18: mol_type = other RNA
tttactcctctgaaggaa

SEQ ID NO: 1656 - RNA, 19 nt, synthetic construct
  source 1..19: mol_type = other RNA
gtttactcctctgaaggaa

SEQ ID NO: 1657 - RNA, 21 nt, synthetic construct
  source 1..21: mol_type = other RNA
cagtttactcctctgaaggaa

SEQ ID NO: 1658 - RNA, 22 nt, synthetic construct
  source 1..22: mol_type = other RNA
tcagtttactcctctgaaggaa

SEQ ID NO: 1659-1663 - skipped (5 entries)

SEQ ID NO: 1664 - RNA, 10 nt, synthetic construct
  source 1..10: mol_type = other RNA
cttcagagga

SEQ ID NO: 1665 - RNA, 11 nt, synthetic construct
  source 1..11: mol_type = other RNA
cttcagaggag

SEQ ID NO: 1666 - RNA, 12 nt, synthetic construct
  source 1..12: mol_type = other RNA
cttcagaggagt

SEQ ID NO: 1667 - RNA, 13 nt, synthetic construct
  source 1..13: mol_type = other RNA
cttcagaggagta

SEQ ID NO: 1668 - RNA, 14 nt, synthetic construct
  source 1..14: mol_type = other RNA
cttcagaggagtaa

SEQ ID NO: 1669 - RNA, 15 nt, synthetic construct
  source 1..15: mol_type = other RNA
cttcagaggagtaaa

SEQ ID NO: 1670 - RNA, 16 nt, synthetic construct
  source 1..16: mol_type = other RNA
cttcagaggagtaaac

SEQ ID NO: 1671 - RNA, 17 nt, synthetic construct
  source 1..17: mol_type = other RNA
cttcagaggagtaaact

SEQ ID NO: 1672 - RNA, 18 nt, synthetic construct
  source 1..18: mol_type = other RNA
cttcagaggagtaaactg

SEQ ID NO: 1673 - RNA, 19 nt, synthetic construct
  source 1..19: mol_type = other RNA
cttcagaggagtaaactga

SEQ ID NO: 1674 - RNA, 146 nt, synthetic construct
  source 1..146: mol_type = other RNA
agtttactcctctgaaggaagttttagagctagaaatagcaagttaaaataaggctagtccgttatcaacttgaaaaagtggcaccgagtcggtgcatgatcctgacgacggagaccgccgtcgtcgacaagcccttcagaggagt

SEQ ID NO: 1675 - RNA, 154 nt, synthetic construct
  source 1..154: mol_type = other RNA
gagtttactcctctgaaggaagttttagagctagaaatagcaagttaaaataaggctagtccgttatcaacttgaaaaagtggcaccgagtcggtgcatgatcctgacgacggagaccgccgtcgtcgacaagcccttcagaggagtttttttt

SEQ ID NO: 1676 - RNA, 144 nt, synthetic construct
  source 1..144: mol_type = other RNA
agtttactcctctgaaggaagttttagagctagaaatagcaagttaaaataaggctagtccgttatcaacttgaaaaagtggcaccgagtcggtgcatgatcctgacgacggagaccgccgtcgtcgacaagcccttcagagga

SEQ ID NO: 1677 - RNA, 152 nt, synthetic construct
  source 1..152: mol_type = other RNA
gagtttactcctctgaaggaagttttagagctagaaatagcaagttaaaataaggctagtccgttatcaacttgaaaaagtggcaccgagtcggtgcatgatcctgacgacggagaccgccgtcgtcgacaagcccttcagaggattttttt

SEQ ID NO: 1678 - RNA, 20 nt, synthetic construct
  source 1..20: mol_type = other RNA
agcagtgctcaaaacatcca

SEQ ID NO: 1679 - RNA, 17 nt, synthetic construct
  source 1..17: mol_type = other RNA
agtgctcaaaacatcca

SEQ ID NO: 1680 - RNA, 18 nt, synthetic construct
  source 1..18: mol_type = other RNA
cagtgctcaaaacatcca

SEQ ID NO: 1681 - RNA, 19 nt, synthetic construct
  source 1..19: mol_type = other RNA
gcagtgctcaaaacatcca

SEQ ID NO: 1682 - RNA, 21 nt, synthetic construct
  source 1..21: mol_type = other RNA
aagcagtgctcaaaacatcca

SEQ ID NO: 1683 - RNA, 22 nt, synthetic construct
  source 1..22: mol_type = other RNA
aaagcagtgctcaaaacatcca

SEQ ID NO: 1684-1688 - skipped (5 entries)

SEQ ID NO: 1689 - RNA, 10 nt, synthetic construct
  source 1..10: mol_type = other RNA
atgttttgag

SEQ ID NO: 1690 - RNA, 11 nt, synthetic construct
  source 1..11: mol_type = other RNA
atgttttgagc

SEQ ID NO: 1691 - RNA, 12 nt, synthetic construct
  source 1..12: mol_type = other RNA
atgttttgagca

SEQ ID NO: 1692 - RNA, 13 nt, synthetic construct
  source 1..13: mol_type = other RNA
atgttttgagcac

SEQ ID NO: 1693 - RNA, 14 nt, synthetic construct
  source 1..14: mol_type = other RNA
atgttttgagcact

SEQ ID NO: 1694 - RNA, 15 nt, synthetic construct
  source 1..15: mol_type = other RNA
atgttttgagcactg

SEQ ID NO: 1695 - RNA, 16 nt, synthetic construct
  source 1..16: mol_type = other RNA
atgttttgagcactgc

SEQ ID NO: 1696 - RNA, 17 nt, synthetic construct
  source 1..17: mol_type = other RNA
atgttttgagcactgct

SEQ ID NO: 1697 - RNA, 18 nt, synthetic construct
  source 1..18: mol_type = other RNA
atgttttgagcactgctt

SEQ ID NO: 1698 - RNA, 19 nt, synthetic construct
  source 1..19: mol_type = other RNA
atgttttgagcactgcttt

SEQ ID NO: 1699 - RNA, 146 nt, synthetic construct
  source 1..146: mol_type = other RNA
agcagtgctcaaaacatccagttttagagctagaaatagcaagttaaaataaggctagtccgttatcaacttgaaaaagtggcaccgagtcggtgcatgatcctgacgacggagaccgccgtcgtcgacaagccatgttttgagca

SEQ ID NO: 1700 - RNA, 154 nt, synthetic construct
  source 1..154: mol_type = other RNA
gagcagtgctcaaaacatccagttttagagctagaaatagcaagttaaaataaggctagtccgttatcaacttgaaaaagtggcaccgagtcggtgcatgatcctgacgacggagaccgccgtcgtcgacaagccatgttttgagcattttttt

SEQ ID NO: 1701 - RNA, 144 nt, synthetic construct
  source 1..144: mol_type = other RNA
agcagtgctcaaaacatccagttttagagctagaaatagcaagttaaaataaggctagtccgttatcaacttgaaaaagtggcaccgagtcggtgcatgatcctgacgacggagaccgccgtcgtcgacaagccatgttttgag

SEQ ID NO: 1702 - RNA, 152 nt, synthetic construct
  source 1..152: mol_type = other RNA
gagcagtgctcaaaacatccagttttagagctagaaatagcaagttaaaataaggctagtccgttatcaacttgaaaaagtggcaccgagtcggtgcatgatcctgacgacggagaccgccgtcgtcgacaagccatgttttgagttttttt

SEQ ID NO: 1703 - RNA, 20 nt, synthetic construct
  source 1..20: mol_type = other RNA
agacattaagtggcagagct

SEQ ID NO: 1704 - RNA, 17 nt, synthetic construct
  source 1..17: mol_type = other RNA
cattaagtggcagagct

SEQ ID NO: 1705 - RNA, 18 nt, synthetic construct
  source 1..18: mol_type = other RNA
acattaagtggcagagct

SEQ ID NO: 1706 - RNA, 19 nt, synthetic construct
  source 1..19: mol_type = other RNA
gacattaagtggcagagct

SEQ ID NO: 1707 - RNA, 21 nt, synthetic construct
  source 1..21: mol_type = other RNA
cagacattaagtggcagagct

SEQ ID NO: 1708 - RNA, 22 nt, synthetic construct
  source 1..22: mol_type = other RNA
acagacattaagtggcagagct

SEQ ID NO: 1709-1713 - skipped (5 entries)

SEQ ID NO: 1714 - RNA, 10 nt, synthetic construct
  source 1..10: mol_type = other RNA
tctgccactt

SEQ ID NO: 1715 - RNA, 11 nt, synthetic construct
  source 1..11: mol_type = other RNA
tctgccactta

SEQ ID NO: 1716 - RNA, 12 nt, synthetic construct
  source 1..12: mol_type = other RNA
tctgccacttaa

SEQ ID NO: 1717 - RNA, 13 nt, synthetic construct
  source 1..13: mol_type = other RNA
tctgccacttaat

SEQ ID NO: 1718 - RNA, 14 nt, synthetic construct
  source 1..14: mol_type = other RNA
tctgccacttaatg

SEQ ID NO: 1719 - RNA, 15 nt, synthetic construct
  source 1..15: mol_type = other RNA
tctgccacttaatgt

SEQ ID NO: 1720 - RNA, 16 nt, synthetic construct
  source 1..16: mol_type = other RNA
tctgccacttaatgtc

SEQ ID NO: 1721 - RNA, 17 nt, synthetic construct
  source 1..17: mol_type = other RNA
tctgccacttaatgtct

SEQ ID NO: 1722 - RNA, 18 nt, synthetic construct
  source 1..18: mol_type = other RNA
tctgccacttaatgtctg

SEQ ID NO: 1723 - RNA, 19 nt, synthetic construct
  source 1..19: mol_type = other RNA
tctgccacttaatgtctgt

SEQ ID NO: 1724 - RNA, 146 nt, synthetic construct
  source 1..146: mol_type = other RNA
agacattaagtggcagagctgttttagagctagaaatagcaagttaaaataaggctagtccgttatcaacttgaaaaagtggcaccgagtcggtgcatgatcctgacgacggagaccgccgtcgtcgacaagcctctgccacttaa

SEQ ID NO: 1725 - RNA, 154 nt, synthetic construct
  source 1..154: mol_type = other RNA
gagacattaagtggcagagctgttttagagctagaaatagcaagttaaaataaggctagtccgttatcaacttgaaaaagtggcaccgagtcggtgcatgatcctgacgacggagaccgccgtcgtcgacaagcctctgccacttaattttttt

SEQ ID NO: 1726 - RNA, 144 nt, synthetic construct
  source 1..144: mol_type = other RNA
agacattaagtggcagagctgttttagagctagaaatagcaagttaaaataaggctagtccgttatcaacttgaaaaagtggcaccgagtcggtgcatgatcctgacgacggagaccgccgtcgtcgacaagcctctgccactt

SEQ ID NO: 1727 - RNA, 152 nt, synthetic construct
  source 1..152: mol_type = other RNA
gagacattaagtggcagagctgttttagagctagaaatagcaagttaaaataaggctagtccgttatcaacttgaaaaagtggcaccgagtcggtgcatgatcctgacgacggagaccgccgtcgtcgacaagcctctgccacttttttttt

SEQ ID NO: 1728 - RNA, 20 nt, synthetic construct
  source 1..20: mol_type = other RNA
tgaggaaactgacgcaccaa

SEQ ID NO: 1729 - RNA, 17 nt, synthetic construct
  source 1..17: mol_type = other RNA
ggaaactgacgcaccaa

SEQ ID NO: 1730 - RNA, 18 nt, synthetic construct
  source 1..18: mol_type = other RNA
aggaaactgacgcaccaa

SEQ ID NO: 1731 - RNA, 19 nt, synthetic construct
  source 1..19: mol_type = other RNA
gaggaaactgacgcaccaa

SEQ ID NO: 1732 - RNA, 21 nt, synthetic construct
  source 1..21: mol_type = other RNA
atgaggaaactgacgcaccaa

SEQ ID NO: 1733 - RNA, 22 nt, synthetic construct
  source 1..22: mol_type = other RNA
gatgaggaaactgacgcaccaa

SEQ ID NO: 1734-1738 - skipped (5 entries)

SEQ ID NO: 1739 - RNA, 10 nt, synthetic construct
  source 1..10: mol_type = other RNA
gtgcgtcagt

SEQ ID NO: 1740 - RNA, 11 nt, synthetic construct
  source 1..11: mol_type = other RNA
gtgcgtcagtt

SEQ ID NO: 1741 - RNA, 12 nt, synthetic construct
  source 1..12: mol_type = other RNA
gtgcgtcagttt

SEQ ID NO: 1742 - RNA, 13 nt, synthetic construct
  source 1..13: mol_type = other RNA
gtgcgtcagtttc

SEQ ID NO: 1743 - RNA, 14 nt, synthetic construct
  source 1..14: mol_type = other RNA
gtgcgtcagtttcc

SEQ ID NO: 1744 - RNA, 15 nt, synthetic construct
  source 1..15: mol_type = other RNA
gtgcgtcagtttcct

SEQ ID NO: 1745 - RNA, 16 nt, synthetic construct
  source 1..16: mol_type = other RNA
gtgcgtcagtttcctc

SEQ ID NO: 1746 - RNA, 17 nt, synthetic construct
  source 1..17: mol_type = other RNA
gtgcgtcagtttcctca

SEQ ID NO: 1747 - RNA, 18 nt, synthetic construct
  source 1..18: mol_type = other RNA
gtgcgtcagtttcctcat

SEQ ID NO: 1748 - RNA, 19 nt, synthetic construct
  source 1..19: mol_type = other RNA
gtgcgtcagtttcctcatc

SEQ ID NO: 1749 - RNA, 146 nt, synthetic construct
  source 1..146: mol_type = other RNA
tgaggaaactgacgcaccaagttttagagctagaaatagcaagttaaaataaggctagtccgttatcaacttgaaaaagtggcaccgagtcggtgcatgatcctgacgacggagaccgccgtcgtcgacaagccgtgcgtcagttt

SEQ ID NO: 1750 - RNA, 154 nt, synthetic construct
  source 1..154: mol_type = other RNA
gtgaggaaactgacgcaccaagttttagagctagaaatagcaagttaaaataaggctagtccgttatcaacttgaaaaagtggcaccgagtcggtgcatgatcctgacgacggagaccgccgtcgtcgacaagccgtgcgtcagtttttttttt

SEQ ID NO: 1751 - RNA, 144 nt, synthetic construct
  source 1..144: mol_type = other RNA
tgaggaaactgacgcaccaagttttagagctagaaatagcaagttaaaataaggctagtccgttatcaacttgaaaaagtggcaccgagtcggtgcatgatcctgacgacggagaccgccgtcgtcgacaagccgtgcgtcagt

SEQ ID NO: 1752 - RNA, 152 nt, synthetic construct
  source 1..152: mol_type = other RNA
gtgaggaaactgacgcaccaagttttagagctagaaatagcaagttaaaataaggctagtccgttatcaacttgaaaaagtggcaccgagtcggtgcatgatcctgacgacggagaccgccgtcgtcgacaagccgtgcgtcagtttttttt

SEQ ID NO: 1753 - RNA, 20 nt, synthetic construct
  source 1..20: mol_type = other RNA
ggctgggaacatgagcctgg

SEQ ID NO: 1754 - RNA, 17 nt, synthetic construct
  source 1..17: mol_type = other RNA
tgggaacatgagcctgg

SEQ ID NO: 1755 - RNA, 18 nt, synthetic construct
  source 1..18: mol_type = other RNA
ctgggaacatgagcctgg

SEQ ID NO: 1756 - RNA, 19 nt, synthetic construct
  source 1..19: mol_type = other RNA
gctgggaacatgagcctgg

SEQ ID NO: 1757 - RNA, 21 nt, synthetic construct
  source 1..21: mol_type = other RNA
tggctgggaacatgagcctgg

SEQ ID NO: 1758 - RNA, 22 nt, synthetic construct
  source 1..22: mol_type = other RNA
ttggctgggaacatgagcctgg

SEQ ID NO: 1759-1762 - skipped (4 entries)

SEQ ID NO: 1763 - RNA, 10 nt, synthetic construct
  source 1..10: mol_type = other RNA
ggctcatgtt

SEQ ID NO: 1764 - RNA, 11 nt, synthetic construct
  source 1..11: mol_type = other RNA
ggctcatgttc

SEQ ID NO: 1765 - RNA, 12 nt, synthetic construct
  source 1..12: mol_type = other RNA
ggctcatgttcc

SEQ ID NO: 1766 - RNA, 13 nt, synthetic construct
  source 1..13: mol_type = other RNA
ggctcatgttccc

SEQ ID NO: 1767 - RNA, 14 nt, synthetic construct
  source 1..14: mol_type = other RNA
ggctcatgttccca

SEQ ID NO: 1768 - RNA, 15 nt, synthetic construct
  source 1..15: mol_type = other RNA
ggctcatgttcccag

SEQ ID NO: 1769 - RNA, 16 nt, synthetic construct
  source 1..16: mol_type = other RNA
ggctcatgttcccagc

SEQ ID NO: 1770 - RNA, 17 nt, synthetic construct
  source 1..17: mol_type = other RNA
ggctcatgttcccagcc

SEQ ID NO: 1771 - RNA, 18 nt, synthetic construct
  source 1..18: mol_type = other RNA
ggctcatgttcccagcca

SEQ ID NO: 1772 - RNA, 19 nt, synthetic construct
  source 1..19: mol_type = other RNA
ggctcatgttcccagccaa

SEQ ID NO: 1773 - RNA, 146 nt, synthetic construct
  source 1..146: mol_type = other RNA
ggctgggaacatgagcctgggttttagagctagaaatagcaagttaaaataaggctagtccgttatcaacttgaaaaagtggcaccgagtcggtgcatgatcctgacgacggagaccgccgtcgtcgacaagccggctcatgttcc

SEQ ID NO: 1774 - RNA, 153 nt, synthetic construct
  source 1..153: mol_type = other RNA
ggctgggaacatgagcctgggttttagagctagaaatagcaagttaaaataaggctagtccgttatcaacttgaaaaagtggcaccgagtcggtgcatgatcctgacgacggagaccgccgtcgtcgacaagccggctcatgttccttttttt

SEQ ID NO: 1775 - RNA, 144 nt, synthetic construct
  source 1..144: mol_type = other RNA
ggctgggaacatgagcctgggttttagagctagaaatagcaagttaaaataaggctagtccgttatcaacttgaaaaagtggcaccgagtcggtgcatgatcctgacgacggagaccgccgtcgtcgacaagccggctcatgtt

SEQ ID NO: 1776 - RNA, 151 nt, synthetic construct
  source 1..151: mol_type = other RNA
ggctgggaacatgagcctgggttttagagctagaaatagcaagttaaaataaggctagtccgttatcaacttgaaaaagtggcaccgagtcggtgcatgatcctgacgacggagaccgccgtcgtcgacaagccggctcatgttttttttt

SEQ ID NO: 1777-1801 - skipped (25 entries)

SEQ ID NO: 1802 - RNA, 20 nt, synthetic construct
  source 1..20: mol_type = other RNA
ctatgacagctgaaataaga

SEQ ID NO: 1803 - RNA, 17 nt, synthetic construct
  source 1..17: mol_type = other RNA
tgacagctgaaataaga

SEQ ID NO: 1804 - RNA, 18 nt, synthetic construct
  source 1..18: mol_type = other RNA
atgacagctgaaataaga

SEQ ID NO: 1805 - RNA, 19 nt, synthetic construct
  source 1..19: mol_type = other RNA
tatgacagctgaaataaga

SEQ ID NO: 1806 - RNA, 21 nt, synthetic construct
  source 1..21: mol_type = other RNA
actatgacagctgaaataaga

SEQ ID NO: 1807 - RNA, 22 nt, synthetic construct
  source 1..22: mol_type = other RNA
cactatgacagctgaaataaga

SEQ ID NO: 1808-1812 - skipped (5 entries)

SEQ ID NO: 1813 - RNA, 10 nt, synthetic construct
  source 1..10: mol_type = other RNA
tatttcagct

SEQ ID NO: 1814 - RNA, 11 nt, synthetic construct
  source 1..11: mol_type = other RNA
tatttcagctg

SEQ ID NO: 1815 - RNA, 12 nt, synthetic construct
  source 1..12: mol_type = other RNA
tatttcagctgt

SEQ ID NO: 1816 - RNA, 13 nt, synthetic construct
  source 1..13: mol_type = other RNA
tatttcagctgtc

SEQ ID NO: 1817 - RNA, 14 nt, synthetic construct
  source 1..14: mol_type = other RNA
tatttcagctgtca

SEQ ID NO: 1818 - RNA, 15 nt, synthetic construct
  source 1..15: mol_type = other RNA
tatttcagctgtcat

SEQ ID NO: 1819 - RNA, 16 nt, synthetic construct
  source 1..16: mol_type = other RNA
tatttcagctgtcata

SEQ ID NO: 1820 - RNA, 17 nt, synthetic construct
  source 1..17: mol_type = other RNA
tatttcagctgtcatag

SEQ ID NO: 1821 - RNA, 18 nt, synthetic construct
  source 1..18: mol_type = other RNA
tatttcagctgtcatagt

SEQ ID NO: 1822 - RNA, 19 nt, synthetic construct
  source 1..19: mol_type = other RNA
tatttcagctgtcatagtg

SEQ ID NO: 1823 - RNA, 146 nt, synthetic construct
  source 1..146: mol_type = other RNA
ctatgacagctgaaataagagttttagagctagaaatagcaagttaaaataaggctagtccgttatcaacttgaaaaagtggcaccgagtcggtgcatgatcctgacgacggagaccgccgtcgtcgacaagcctatttcagctgt

SEQ ID NO: 1824 - RNA, 154 nt, synthetic construct
  source 1..154: mol_type = other RNA
gctatgacagctgaaataagagttttagagctagaaatagcaagttaaaataaggctagtccgttatcaacttgaaaaagtggcaccgagtcggtgcatgatcctgacgacggagaccgccgtcgtcgacaagcctatttcagctgtttttttt

SEQ ID NO: 1825 - RNA, 144 nt, synthetic construct
  source 1..144: mol_type = other RNA
ctatgacagctgaaataagagttttagagctagaaatagcaagttaaaataaggctagtccgttatcaacttgaaaaagtggcaccgagtcggtgcatgatcctgacgacggagaccgccgtcgtcgacaagcctatttcagct

SEQ ID NO: 1826 - RNA, 152 nt, synthetic construct
  source 1..152: mol_type = other RNA
gctatgacagctgaaataagagttttagagctagaaatagcaagttaaaataaggctagtccgttatcaacttgaaaaagtggcaccgagtcggtgcatgatcctgacgacggagaccgccgtcgtcgacaagcctatttcagctttttttt

SEQ ID NO: 1827 - RNA, 20 nt, synthetic construct
  source 1..20: mol_type = other RNA
caagactagcctggccaaca

SEQ ID NO: 1828 - RNA, 17 nt, synthetic construct
  source 1..17: mol_type = other RNA
gactagcctggccaaca

SEQ ID NO: 1829 - RNA, 18 nt, synthetic construct
  source 1..18: mol_type = other RNA
agactagcctggccaaca

SEQ ID NO: 1830 - RNA, 19 nt, synthetic construct
  source 1..19: mol_type = other RNA
aagactagcctggccaaca

SEQ ID NO: 1831 - RNA, 21 nt, synthetic construct
  source 1..21: mol_type = other RNA
tcaagactagcctggccaaca

SEQ ID NO: 1832 - RNA, 22 nt, synthetic construct
  source 1..22: mol_type = other RNA
ttcaagactagcctggccaaca

SEQ ID NO: 1833 - skipped

SEQ ID NO: 1834 - RNA, 10 nt, synthetic construct
  source 1..10: mol_type = other RNA
tggccaggct

SEQ ID NO: 1835 - RNA, 11 nt, synthetic construct
  source 1..11: mol_type = other RNA
tggccaggcta

SEQ ID NO: 1836 - RNA, 12 nt, synthetic construct
  source 1..12: mol_type = other RNA
tggccaggctag

SEQ ID NO: 1837 - RNA, 13 nt, synthetic construct
  source 1..13: mol_type = other RNA
tggccaggctagt

SEQ ID NO: 1838 - RNA, 14 nt, synthetic construct
  source 1..14: mol_type = other RNA
tggccaggctagtc

SEQ ID NO: 1839 - RNA, 15 nt, synthetic construct
  source 1..15: mol_type = other RNA
tggccaggctagtct

SEQ ID NO: 1840 - RNA, 16 nt, synthetic construct
  source 1..16: mol_type = other RNA
tggccaggctagtctt

SEQ ID NO: 1841 - RNA, 17 nt, synthetic construct
  source 1..17: mol_type = other RNA
tggccaggctagtcttg

SEQ ID NO: 1842 - RNA, 18 nt, synthetic construct
  source 1..18: mol_type = other RNA
tggccaggctagtcttga

SEQ ID NO: 1843 - RNA, 19 nt, synthetic construct
  source 1..19: mol_type = other RNA
tggccaggctagtcttgaa

SEQ ID NO: 1844 - RNA, 146 nt, synthetic construct
  source 1..146: mol_type = other RNA
caagactagcctggccaacagttttagagctagaaatagcaagttaaaataaggctagtccgttatcaacttgaaaaagtggcaccgagtcggtgcatgatcctgacgacggagaccgccgtcgtcgacaagcctggccaggctag

SEQ ID NO: 1845 - RNA, 154 nt, synthetic construct
  source 1..154: mol_type = other RNA
gcaagactagcctggccaacagttttagagctagaaatagcaagttaaaataaggctagtccgttatcaacttgaaaaagtggcaccgagtcggtgcatgatcctgacgacggagaccgccgtcgtcgacaagcctggccaggctagttttttt

SEQ ID NO: 1846 - RNA, 144 nt, synthetic construct
  source 1..144: mol_type = other RNA
caagactagcctggccaacagttttagagctagaaatagcaagttaaaataaggctagtccgttatcaacttgaaaaagtggcaccgagtcggtgcatgatcctgacgacggagaccgccgtcgtcgacaagcctggccaggct

SEQ ID NO: 1847 - RNA, 152 nt, synthetic construct
  source 1..152: mol_type = other RNA
gcaagactagcctggccaacagttttagagctagaaatagcaagttaaaataaggctagtccgttatcaacttgaaaaagtggcaccgagtcggtgcatgatcctgacgacggagaccgccgtcgtcgacaagcctggccaggctttttttt

SEQ ID NO: 1848 - RNA, 20 nt, synthetic construct
  source 1..20: mol_type = other RNA
tcaggagttcaagactagcc

SEQ ID NO: 1849 - RNA, 17 nt, synthetic construct
  source 1..17: mol_type = other RNA
ggagttcaagactagcc

SEQ ID NO: 1850 - RNA, 18 nt, synthetic construct
  source 1..18: mol_type = other RNA
aggagttcaagactagcc

SEQ ID NO: 1851 - RNA, 19 nt, synthetic construct
  source 1..19: mol_type = other RNA
caggagttcaagactagcc

SEQ ID NO: 1852 - RNA, 21 nt, synthetic construct
  source 1..21: mol_type = other RNA
gtcaggagttcaagactagcc

SEQ ID NO: 1853 - RNA, 22 nt, synthetic construct
  source 1..22: mol_type = other RNA
ggtcaggagttcaagactagcc

SEQ ID NO: 1854-1858 - skipped (5 entries)

SEQ ID NO: 1859 - RNA, 10 nt, synthetic construct
  source 1..10: mol_type = other RNA
tagtcttgaa

SEQ ID NO: 1860 - RNA, 11 nt, synthetic construct
  source 1..11: mol_type = other RNA
tagtcttgaac

SEQ ID NO: 1861 - RNA, 12 nt, synthetic construct
  source 1..12: mol_type = other RNA
tagtcttgaact

SEQ ID NO: 1862 - RNA, 13 nt, synthetic construct
  source 1..13: mol_type = other RNA
tagtcttgaactc

SEQ ID NO: 1863 - RNA, 14 nt, synthetic construct
  source 1..14: mol_type = other RNA
tagtcttgaactcc

SEQ ID NO: 1864 - RNA, 15 nt, synthetic construct
  source 1..15: mol_type = other RNA
tagtcttgaactcct

SEQ ID NO: 1865 - RNA, 16 nt, synthetic construct
  source 1..16: mol_type = other RNA
tagtcttgaactcctg

SEQ ID NO: 1866 - RNA, 17 nt, synthetic construct
  source 1..17: mol_type = other RNA
tagtcttgaactcctga

SEQ ID NO: 1867 - RNA, 18 nt, synthetic construct
  source 1..18: mol_type = other RNA
tagtcttgaactcctgac

SEQ ID NO: 1868 - RNA, 19 nt, synthetic construct
  source 1..19: mol_type = other RNA
tagtcttgaactcctgacc

SEQ ID NO: 1869 - RNA, 146 nt, synthetic construct
  source 1..146: mol_type = other RNA
tcaggagttcaagactagccgttttagagctagaaatagcaagttaaaataaggctagtccgttatcaacttgaaaaagtggcaccgagtcggtgcatgatcctgacgacggagaccgccgtcgtcgacaagcctagtcttgaact

SEQ ID NO: 1870 - RNA, 154 nt, synthetic construct
  source 1..154: mol_type = other RNA
gtcaggagttcaagactagccgttttagagctagaaatagcaagttaaaataaggctagtccgttatcaacttgaaaaagtggcaccgagtcggtgcatgatcctgacgacggagaccgccgtcgtcgacaagcctagtcttgaactttttttt

SEQ ID NO: 1871 - RNA, 144 nt, synthetic construct
  source 1..144: mol_type = other RNA
tcaggagttcaagactagccgttttagagctagaaatagcaagttaaaataaggctagtccgttatcaacttgaaaaagtggcaccgagtcggtgcatgatcctgacgacggagaccgccgtcgtcgacaagcctagtcttgaa

SEQ ID NO: 1872 - RNA, 152 nt, synthetic construct
  source 1..152: mol_type = other RNA
gtcaggagttcaagactagccgttttagagctagaaatagcaagttaaaataaggctagtccgttatcaacttgaaaaagtggcaccgagtcggtgcatgatcctgacgacggagaccgccgtcgtcgacaagcctagtcttgaattttttt

SEQ ID NO: 1873 - RNA, 20 nt, synthetic construct
  source 1..20: mol_type = other RNA
tgattcattaacactgatct

SEQ ID NO: 1874 - RNA, 17 nt, synthetic construct
  source 1..17: mol_type = other RNA
ttcattaacactgatct

SEQ ID NO: 1875 - RNA, 18 nt, synthetic construct
  source 1..18: mol_type = other RNA
attcattaacactgatct

SEQ ID NO: 1876 - RNA, 19 nt, synthetic construct
  source 1..19: mol_type = other RNA
gattcattaacactgatct

SEQ ID NO: 1877 - RNA, 21 nt, synthetic construct
  source 1..21: mol_type = other RNA
ttgattcattaacactgatct

SEQ ID NO: 1878 - RNA, 22 nt, synthetic construct
  source 1..22: mol_type = other RNA
gttgattcattaacactgatct

SEQ ID NO: 1879-1883 - skipped (5 entries)

SEQ ID NO: 1884 - RNA, 10 nt, synthetic construct
  source 1..10: mol_type = other RNA
tcagtgttaa

SEQ ID NO: 1885 - RNA, 11 nt, synthetic construct
  source 1..11: mol_type = other RNA
tcagtgttaat

SEQ ID NO: 1886 - RNA, 12 nt, synthetic construct
  source 1..12: mol_type = other RNA
tcagtgttaatg

SEQ ID NO: 1887 - RNA, 13 nt, synthetic construct
  source 1..13: mol_type = other RNA
tcagtgttaatga

SEQ ID NO: 1888 - RNA, 14 nt, synthetic construct
  source 1..14: mol_type = other RNA
tcagtgttaatgaa

SEQ ID NO: 1889 - RNA, 15 nt, synthetic construct
  source 1..15: mol_type = other RNA
tcagtgttaatgaat

SEQ ID NO: 1890 - RNA, 16 nt, synthetic construct
  source 1..16: mol_type = other RNA
tcagtgttaatgaatc

SEQ ID NO: 1891 - RNA, 17 nt, synthetic construct
  source 1..17: mol_type = other RNA
tcagtgttaatgaatca

SEQ ID NO: 1892 - RNA, 18 nt, synthetic construct
  source 1..18: mol_type = other RNA
tcagtgttaatgaatcaa

SEQ ID NO: 1893 - RNA, 19 nt, synthetic construct
  source 1..19: mol_type = other RNA
tcagtgttaatgaatcaac

SEQ ID NO: 1894 - RNA, 146 nt, synthetic construct
  source 1..146: mol_type = other RNA
tgattcattaacactgatctgttttagagctagaaatagcaagttaaaataaggctagtccgttatcaacttgaaaaagtggcaccgagtcggtgcatgatcctgacgacggagaccgccgtcgtcgacaagcctcagtgttaatg

SEQ ID NO: 1895 - RNA, 154 nt, synthetic construct
  source 1..154: mol_type = other RNA
gtgattcattaacactgatctgttttagagctagaaatagcaagttaaaataaggctagtccgttatcaacttgaaaaagtggcaccgagtcggtgcatgatcctgacgacggagaccgccgtcgtcgacaagcctcagtgttaatgttttttt

SEQ ID NO: 1896 - RNA, 144 nt, synthetic construct
  source 1..144: mol_type = other RNA
tgattcattaacactgatctgttttagagctagaaatagcaagttaaaataaggctagtccgttatcaacttgaaaaagtggcaccgagtcggtgcatgatcctgacgacggagaccgccgtcgtcgacaagcctcagtgttaa

SEQ ID NO: 1897 - RNA, 152 nt, synthetic construct
  source 1..152: mol_type = other RNA
gtgattcattaacactgatctgttttagagctagaaatagcaagttaaaataaggctagtccgttatcaacttgaaaaagtggcaccgagtcggtgcatgatcctgacgacggagaccgccgtcgtcgacaagcctcagtgttaattttttt

SEQ ID NO: 1898 - RNA, 20 nt, synthetic construct
  source 1..20: mol_type = other RNA
gtcttgccaaggacctcagc

SEQ ID NO: 1899 - RNA, 17 nt, synthetic construct
  source 1..17: mol_type = other RNA
ttgccaaggacctcagc

SEQ ID NO: 1900 - RNA, 18 nt, synthetic construct
  source 1..18: mol_type = other RNA
cttgccaaggacctcagc

SEQ ID NO: 1901 - RNA, 19 nt, synthetic construct
  source 1..19: mol_type = other RNA
tcttgccaaggacctcagc

SEQ ID NO: 1902 - RNA, 21 nt, synthetic construct
  source 1..21: mol_type = other RNA
ggtcttgccaaggacctcagc

SEQ ID NO: 1903 - RNA, 22 nt, synthetic construct
  source 1..22: mol_type = other RNA
gggtcttgccaaggacctcagc

SEQ ID NO: 1904-1908 - skipped (5 entries)

SEQ ID NO: 1909 - RNA, 10 nt, synthetic construct
  source 1..10: mol_type = other RNA
gaggtccttg

SEQ ID NO: 1910 - RNA, 11 nt, synthetic construct
  source 1..11: mol_type = other RNA
gaggtccttgg

SEQ ID NO: 1911 - RNA, 12 nt, synthetic construct
  source 1..12: mol_type = other RNA
gaggtccttggc

SEQ ID NO: 1912 - RNA, 13 nt, synthetic construct
  source 1..13: mol_type = other RNA
gaggtccttggca

SEQ ID NO: 1913 - RNA, 14 nt, synthetic construct
  source 1..14: mol_type = other RNA
gaggtccttggcaa

SEQ ID NO: 1914 - RNA, 15 nt, synthetic construct
  source 1..15: mol_type = other RNA
gaggtccttggcaag

SEQ ID NO: 1915 - RNA, 16 nt, synthetic construct
  source 1..16: mol_type = other RNA
gaggtccttggcaaga

SEQ ID NO: 1916 - RNA, 17 nt, synthetic construct
  source 1..17: mol_type = other RNA
gaggtccttggcaagac

SEQ ID NO: 1917 - RNA, 18 nt, synthetic construct
  source 1..18: mol_type = other RNA
gaggtccttggcaagacc

SEQ ID NO: 1918 - RNA, 19 nt, synthetic construct
  source 1..19: mol_type = other RNA
gaggtccttggcaagaccc

SEQ ID NO: 1919 - RNA, 146 nt, synthetic construct
  source 1..146: mol_type = other RNA
gtcttgccaaggacctcagcgttttagagctagaaatagcaagttaaaataaggctagtccgttatcaacttgaaaaagtggcaccgagtcggtgcatgatcctgacgacggagaccgccgtcgtcgacaagccgaggtccttggc

SEQ ID NO: 1920 - RNA, 153 nt, synthetic construct
  source 1..153: mol_type = other RNA
gtcttgccaaggacctcagcgttttagagctagaaatagcaagttaaaataaggctagtccgttatcaacttgaaaaagtggcaccgagtcggtgcatgatcctgacgacggagaccgccgtcgtcgacaagccgaggtccttggcttttttt

SEQ ID NO: 1921 - RNA, 144 nt, synthetic construct
  source 1..144: mol_type = other RNA
gtcttgccaaggacctcagcgttttagagctagaaatagcaagttaaaataaggctagtccgttatcaacttgaaaaagtggcaccgagtcggtgcatgatcctgacgacggagaccgccgtcgtcgacaagccgaggtccttg

SEQ ID NO: 1922 - RNA, 151 nt, synthetic construct
  source 1..151: mol_type = other RNA
gtcttgccaaggacctcagcgttttagagctagaaatagcaagttaaaataaggctagtccgttatcaacttgaaaaagtggcaccgagtcggtgcatgatcctgacgacggagaccgccgtcgtcgacaagccgaggtccttgttttttt

SEQ ID NO: 1923 - RNA, 20 nt, synthetic construct
  source 1..20: mol_type = other RNA
cacagcatttccatcacatc

SEQ ID NO: 1924 - RNA, 17 nt, synthetic construct
  source 1..17: mol_type = other RNA
agcatttccatcacatc

SEQ ID NO: 1925 - RNA, 18 nt, synthetic construct
  source 1..18: mol_type = other RNA
cagcatttccatcacatc

SEQ ID NO: 1926 - RNA, 19 nt, synthetic construct
  source 1..19: mol_type = other RNA
acagcatttccatcacatc

SEQ ID NO: 1927 - RNA, 21 nt, synthetic construct
  source 1..21: mol_type = other RNA
acacagcatttccatcacatc

SEQ ID NO: 1928 - RNA, 22 nt, synthetic construct
  source 1..22: mol_type = other RNA
gacacagcatttccatcacatc

SEQ ID NO: 1929-1932 - skipped (4 entries)

SEQ ID NO: 1933 - RNA, 10 nt, synthetic construct
  source 1..10: mol_type = other RNA
gtgatggaaa

SEQ ID NO: 1934 - RNA, 11 nt, synthetic construct
  source 1..11: mol_type = other RNA
gtgatggaaat

SEQ ID NO: 1935 - RNA, 12 nt, synthetic construct
  source 1..12: mol_type = other RNA
gtgatggaaatg

SEQ ID NO: 1936 - RNA, 13 nt, synthetic construct
  source 1..13: mol_type = other RNA
gtgatggaaatgc

SEQ ID NO: 1937 - RNA, 14 nt, synthetic construct
  source 1..14: mol_type = other RNA
gtgatggaaatgct

SEQ ID NO: 1938 - RNA, 15 nt, synthetic construct
  source 1..15: mol_type = other RNA
gtgatggaaatgctg

SEQ ID NO: 1939 - RNA, 16 nt, synthetic construct
  source 1..16: mol_type = other RNA
gtgatggaaatgctgt

SEQ ID NO: 1940 - RNA, 17 nt, synthetic construct
  source 1..17: mol_type = other RNA
gtgatggaaatgctgtg

SEQ ID NO: 1941 - RNA, 18 nt, synthetic construct
  source 1..18: mol_type = other RNA
gtgatggaaatgctgtgt

SEQ ID NO: 1942 - RNA, 19 nt, synthetic construct
  source 1..19: mol_type = other RNA
gtgatggaaatgctgtgtc

SEQ ID NO: 1943 - RNA, 146 nt, synthetic construct
  source 1..146: mol_type = other RNA
cacagcatttccatcacatcgttttagagctagaaatagcaagttaaaataaggctagtccgttatcaacttgaaaaagtggcaccgagtcggtgcatgatcctgacgacggagaccgccgtcgtcgacaagccgtgatggaaatg

SEQ ID NO: 1944 - RNA, 154 nt, synthetic construct
  source 1..154: mol_type = other RNA
gcacagcatttccatcacatcgttttagagctagaaatagcaagttaaaataaggctagtccgttatcaacttgaaaaagtggcaccgagtcggtgcatgatcctgacgacggagaccgccgtcgtcgacaagccgtgatggaaatgttttttt

SEQ ID NO: 1945 - RNA, 144 nt, synthetic construct
  source 1..144: mol_type = other RNA
cacagcatttccatcacatcgttttagagctagaaatagcaagttaaaataaggctagtccgttatcaacttgaaaaagtggcaccgagtcggtgcatgatcctgacgacggagaccgccgtcgtcgacaagccgtgatggaaa

SEQ ID NO: 1946 - RNA, 152 nt, synthetic construct
  source 1..152: mol_type = other RNA
gcacagcatttccatcacatcgttttagagctagaaatagcaagttaaaataaggctagtccgttatcaacttgaaaaagtggcaccgagtcggtgcatgatcctgacgacggagaccgccgtcgtcgacaagccgtgatggaaattttttt

SEQ ID NO: 1947 - RNA, 20 nt, synthetic construct
  source 1..20: mol_type = other RNA
ctgctgaagtccagaagatt

SEQ ID NO: 1948 - RNA, 17 nt, synthetic construct
  source 1..17: mol_type = other RNA
ctgaagtccagaagatt

SEQ ID NO: 1949 - RNA, 18 nt, synthetic construct
  source 1..18: mol_type = other RNA
gctgaagtccagaagatt

SEQ ID NO: 1950 - RNA, 19 nt, synthetic construct
  source 1..19: mol_type = other RNA
tgctgaagtccagaagatt

SEQ ID NO: 1951 - RNA, 21 nt, synthetic construct
  source 1..21: mol_type = other RNA
cctgctgaagtccagaagatt

SEQ ID NO: 1952 - RNA, 22 nt, synthetic construct
  source 1..22: mol_type = other RNA
tcctgctgaagtccagaagatt

SEQ ID NO: 1953-1957 - skipped (5 entries)

SEQ ID NO: 1958 - RNA, 10 nt, synthetic construct
  source 1..10: mol_type = other RNA
cttctggact

SEQ ID NO: 1959 - RNA, 11 nt, synthetic construct
  source 1..11: mol_type = other RNA
cttctggactt

SEQ ID NO: 1960 - RNA, 12 nt, synthetic construct
  source 1..12: mol_type = other RNA
cttctggacttc

SEQ ID NO: 1961 - RNA, 13 nt, synthetic construct
  source 1..13: mol_type = other RNA
cttctggacttca

SEQ ID NO: 1962 - RNA, 14 nt, synthetic construct
  source 1..14: mol_type = other RNA
cttctggacttcag

SEQ ID NO: 1963 - RNA, 15 nt, synthetic construct
  source 1..15: mol_type = other RNA
cttctggacttcagc

SEQ ID NO: 1964 - RNA, 16 nt, synthetic construct
  source 1..16: mol_type = other RNA
cttctggacttcagca

SEQ ID NO: 1965 - RNA, 17 nt, synthetic construct
  source 1..17: mol_type = other RNA
cttctggacttcagcag

SEQ ID NO: 1966 - RNA, 18 nt, synthetic construct
  source 1..18: mol_type = other RNA
cttctggacttcagcagg

SEQ ID NO: 1967 - RNA, 19 nt, synthetic construct
  source 1..19: mol_type = other RNA
cttctggacttcagcagga

SEQ ID NO: 1968 - RNA, 146 nt, synthetic construct
  source 1..146: mol_type = other RNA
ctgctgaagtccagaagattgttttagagctagaaatagcaagttaaaataaggctagtccgttatcaacttgaaaaagtggcaccgagtcggtgcatgatcctgacgacggagaccgccgtcgtcgacaagcccttctggacttc

SEQ ID NO: 1969 - RNA, 154 nt, synthetic construct
  source 1..154: mol_type = other RNA
gctgctgaagtccagaagattgttttagagctagaaatagcaagttaaaataaggctagtccgttatcaacttgaaaaagtggcaccgagtcggtgcatgatcctgacgacggagaccgccgtcgtcgacaagcccttctggacttcttttttt

SEQ ID NO: 1970 - RNA, 144 nt, synthetic construct
  source 1..144: mol_type = other RNA
ctgctgaagtccagaagattgttttagagctagaaatagcaagttaaaataaggctagtccgttatcaacttgaaaaagtggcaccgagtcggtgcatgatcctgacgacggagaccgccgtcgtcgacaagcccttctggact

SEQ ID NO: 1971 - RNA, 152 nt, synthetic construct
  source 1..152: mol_type = other RNA
gctgctgaagtccagaagattgttttagagctagaaatagcaagttaaaataaggctagtccgttatcaacttgaaaaagtggcaccgagtcggtgcatgatcctgacgacggagaccgccgtcgtcgacaagcccttctggactttttttt

SEQ ID NO: 1972 - RNA, 38 nt, synthetic construct
  source 1..38: mol_type = other RNA
ggcttgtcgacgacggcggtctccgtcgtcaggatcat

SEQ ID NO: 1973 - RNA, 18 nt, synthetic construct
  source 1..18: mol_type = other RNA
taagtcaaatgagacttt

SEQ ID NO: 1974 - RNA, 18 nt, synthetic construct
  source 1..18: mol_type = other RNA
aatttcaagatcctgcct

SEQ ID NO: 1975 - RNA, 18 nt, synthetic construct
  source 1..18: mol_type = other RNA
ttgctctctgccatgtac

SEQ ID NO: 1976 - RNA, 15 nt, synthetic construct
  source 1..15: mol_type = other RNA
acctttggccgttct

SEQ ID NO: 1977 - RNA, 18 nt, synthetic construct
  source 1..18: mol_type = other RNA
tctgccctcctcttgggt

SEQ ID NO: 1978 - RNA, 15 nt, synthetic construct
  source 1..15: mol_type = other RNA
atgtacgggccgtcc

SEQ ID NO: 1979 - RNA, 18 nt, synthetic construct
  source 1..18: mol_type = other RNA
ggcctggacgccaggcct

SEQ ID NO: 1980 - RNA, 15 nt, synthetic construct
  source 1..15: mol_type = other RNA
tgccgcacggcggct

SEQ ID NO: 1981 - RNA, 22 nt, synthetic construct
  source 1..22: mol_type = other RNA
ttggagtttgctctgtgtatga

SEQ ID NO: 1982 - RNA, 20 nt, synthetic construct
  source 1..20: mol_type = other RNA
tttacactagatggtgctgt

SEQ ID NO: 1983 - RNA, 20 nt, synthetic construct
  source 1..20: mol_type = other RNA
acttcacatccagtgacgag

SEQ ID NO: 1984 - RNA, 22 nt, synthetic construct
  source 1..22: mol_type = other RNA
gcggtatcacctacgacatcaa

SEQ ID NO: 1985 - RNA, 20 nt, synthetic construct
  source 1..20: mol_type = other RNA
ctgcccctgagggacgatcc

SEQ ID NO: 1986 - RNA, 23 nt, synthetic construct
  source 1..23: mol_type = other RNA
gggtctgatgcccgagaccacga

SEQ ID NO: 1987 - RNA, 20 nt, synthetic construct
  source 1..20: mol_type = other RNA
gccccacgggccgagtgcgg

SEQ ID NO: 1988 - RNA, 30 nt, synthetic construct
  source 1..30: mol_type = other RNA
taactgctctatatacgagattatcaaatc

SEQ ID NO: 1989 - RNA, 30 nt, synthetic construct
  source 1..30: mol_type = other RNA
ggtaacgtaatacaaggaaacatgagacac

SEQ ID NO: 1990 - RNA, 30 nt, synthetic construct
  source 1..30: mol_type = other RNA
caagttgtgcccctagtgagcttggattac

SEQ ID NO: 1991 - RNA, 30 nt, synthetic construct
  source 1..30: mol_type = other RNA
gcgcgaacctgggatcgccatgcatgatag

SEQ ID NO: 1992 - skipped

SEQ ID NO: 1993 - RNA, 38 nt, synthetic construct
  source 1..38: mol_type = other RNA
tttccaagatttgcaaccggcaactgtatgctattacc

SEQ ID NO: 1994 - RNA, 38 nt, synthetic construct
  source 1..38: mol_type = other RNA
tattgttccggtttatcacgaagcgtactcggattaca

SEQ ID NO: 1995 - RNA, 38 nt, synthetic construct
  source 1..38: mol_type = other RNA
tatcgcaccaccctatgcgttccatatcaatacttatc

SEQ ID NO: 1996 - RNA, 38 nt, synthetic construct
  source 1..38: mol_type = other RNA
ttcgtctacagtatccttctttcaacctattcaccgca

SEQ ID NO: 1997 - RNA, 38 nt, synthetic construct
  source 1..38: mol_type = other RNA
tgttatggtgtgaatacttcatggcggatgatttccac

SEQ ID NO: 1998 - RNA, 38 nt, synthetic construct
  source 1..38: mol_type = other RNA
tatgtatacgaagcccatgcaaacatattgccgatcca

SEQ ID NO: 1999 - RNA, 38 nt, synthetic construct
  source 1..38: mol_type = other RNA
ttaccgtgtctacatggtatttggcatttgcgattacc

SEQ ID NO: 2000 - RNA, 38 nt, synthetic construct
  source 1..38: mol_type = other RNA
tatacaaggtacatataccaacgggcactccaacagaa

SEQ ID NO: 2001 - RNA, 38 nt, synthetic construct
  source 1..38: mol_type = other RNA
ttactgcgtatacttggaaatttacacgtccagaggga

SEQ ID NO: 2002 - RNA, 38 nt, synthetic construct
  source 1..38: mol_type = other RNA
tgtatgtacagggtatacggtcaggatatggcaccgcc

SEQ ID NO: 2003 - RNA, 38 nt, synthetic construct
  source 1..38: mol_type = other RNA
tcaccctcgacaagtacaggtactcgaatgcacggaca

SEQ ID NO: 2004 - RNA, 38 nt, synthetic construct
  source 1..38: mol_type = other RNA
ttccgaaagctttcgctctctcaggcgtattctggagc

SEQ ID NO: 2005 - RNA, 38 nt, synthetic construct
  source 1..38: mol_type = other RNA
tggcggagaaatcaattgctctcaacccgtgttgctcc

SEQ ID NO: 2006 - RNA, 38 nt, synthetic construct
  source 1..38: mol_type = other RNA
tcacgttcctcatcttgttaccacgtgcaggcccatac

SEQ ID NO: 2007 - RNA, 38 nt, synthetic construct
  source 1..38: mol_type = other RNA
tctcgtcaagggaaccaaacacgagtatgtgtgggctc

SEQ ID NO: 2008 - RNA, 38 nt, synthetic construct
  source 1..38: mol_type = other RNA
tatactgtgcgccgacatacgagggtttcctgtcactc

SEQ ID NO: 2009 - RNA, 38 nt, synthetic construct
  source 1..38: mol_type = other RNA
tctctggaatctttcgtttctcacgggtgtggtgtggc

SEQ ID NO: 2010 - RNA, 38 nt, synthetic construct
  source 1..38: mol_type = other RNA
tacctatgtacaccagaaccagtcctcgtgtgctccac

SEQ ID NO: 2011 - RNA, 38 nt, synthetic construct
  source 1..38: mol_type = other RNA
taccggagggcgacactcgaggttgtgacctcccacac

SEQ ID NO: 2012 - RNA, 38 nt, synthetic construct
  source 1..38: mol_type = other RNA
tcgtccctgtccgcggccgagagtattgtacgcccaca

SEQ ID NO: 2013 - RNA, 38 nt, synthetic construct
  source 1..38: mol_type = other RNA
tcacgatcgatcgcgcggaactgggtatgctccaccgc

SEQ ID NO: 2014 - RNA, 38 nt, synthetic construct
  source 1..38: mol_type = other RNA
ttctcggaggcatgcgggcatttgcatggctccgtccc

SEQ ID NO: 2015 - RNA, 38 nt, synthetic construct
  source 1..38: mol_type = other RNA
tctctgccgctatgcgttcacgccatggcaaaggcgcc

SEQ ID NO: 2016 - RNA, 38 nt, synthetic construct
  source 1..38: mol_type = other RNA
tgcatgatggtccgatgctgcctgcctcggcctcatcc

SEQ ID NO: 2017 - RNA, 38 nt, synthetic construct
  source 1..38: mol_type = other RNA
tgcgtcgacgcttgcgcatacatgcagaacgggcggtc

SEQ ID NO: 2018 - RNA, 38 nt, synthetic construct
  source 1..38: mol_type = other RNA
tcagctctgtcgaggcccaagccgtggtccttggtgac

SEQ ID NO: 2019 - RNA, 38 nt, synthetic construct
  source 1..38: mol_type = other RNA
tcttccggtacgcgtctcctgggtttcgcccgaaccga

SEQ ID NO: 2020 - RNA, 38 nt, synthetic construct
  source 1..38: mol_type = other RNA
tggcgcaccgcggcggtatctcgggccgagctctgtac

SEQ ID NO: 2021 - RNA, 38 nt, synthetic construct
  source 1..38: mol_type = other RNA
tgccaattgagccgaacagcgcctgcgggcctgccggc

SEQ ID NO: 2022 - RNA, 38 nt, synthetic construct
  source 1..38: mol_type = other RNA
tgtcacacatgctcccggcacctcgcccgacgcacggc

SEQ ID NO: 2023 - RNA, 38 nt, synthetic construct
  source 1..38: mol_type = other RNA
tgcgggcgaacgctgctttcagcggcaccgggcacctc

SEQ ID NO: 2024 - RNA, 38 nt, synthetic construct
  source 1..38: mol_type = other RNA
ttgccgcacgccgagccttctctacgggcccgggcgaa

SEQ ID NO: 2025 - RNA, 38 nt, synthetic construct
  source 1..38: mol_type = other RNA
tgcccgccacgctgcgtccagggacgggaaacgtcacc

SEQ ID NO: 2026 - RNA, 38 nt, synthetic construct
  source 1..38: mol_type = other RNA
tacggcggccggacctctccgcgttacgcctgcatggc

SEQ ID NO: 2027 - RNA, 38 nt, synthetic construct
  source 1..38: mol_type = other RNA
tgctgcgagaaccgcctatcagccgggcgcacgctgcc

SEQ ID NO: 2028 - RNA, 38 nt, synthetic construct
  source 1..38: mol_type = other RNA
tgtgcccaggctttatcggccgcctgccgcgcgttgcc

SEQ ID NO: 2029 - RNA, 38 nt, synthetic construct
  source 1..38: mol_type = other RNA
tgcatcgcggtgcggcccgagccgtcggcgggccttcc

SEQ ID NO: 2030 - RNA, 38 nt, synthetic construct
  source 1..38: mol_type = other RNA
tacgcacacccggcccgggagcgactcggccgcgtggc

SEQ ID NO: 2031 - RNA, 38 nt, synthetic construct
  source 1..38: mol_type = other RNA
tggccgactccggaccgtcacctcgcgcggagcgcggc

SEQ ID NO: 2032 - RNA, 38 nt, synthetic construct
  source 1..38: mol_type = other RNA
tgcgcgccaccacgcgcgcgtggcctccgcacgagacc

SEQ ID NO: 2033 - RNA, 38 nt, synthetic construct
  source 1..38: mol_type = other RNA
tggcggatgagccgcccagaaggcggcgagggccggcc

SEQ ID NO: 2034 - RNA, 38 nt, synthetic construct
  source 1..38: mol_type = other RNA
tgccaggtcgaccgaggccgcgggcccgggaagacggc

SEQ ID NO: 2035 - RNA, 38 nt, synthetic construct
  source 1..38: mol_type = other RNA
tcgcccggcgccgggatgtgcgccgcggagcccggaaa

SEQ ID NO: 2036 - RNA, 38 nt, synthetic construct
  source 1..38: mol_type = other RNA
tcgaagccgcggctggcgcggacgtgcccggcgagcac

SEQ ID NO: 2037 - RNA, 38 nt, synthetic construct
  source 1..38: mol_type = other RNA
tccgtacgggcccagggtacgcccgcgtgccgggcagc

SEQ ID NO: 2038 - RNA, 23 nt, synthetic construct
  source 1..23: mol_type = other RNA
tccgcctcttatctgtgggccgc

SEQ ID NO: 2039 - RNA, 23 nt, synthetic construct
  source 1..23: mol_type = other RNA
tgccaaccgtcgggtccatgcga

SEQ ID NO: 2040 - RNA, 23 nt, synthetic construct
  source 1..23: mol_type = other RNA
ttcgagcgcacccgcaacaagcc

SEQ ID NO: 2041 - RNA, 23 nt, synthetic construct
  source 1..23: mol_type = other RNA
ttcgcgcagcagggttgcgaacc

SEQ ID NO: 2042 - RNA, 23 nt, synthetic construct
  source 1..23: mol_type = other RNA
tttggccggtgcgggacaggtac

SEQ ID NO: 2043 - RNA, 23 nt, synthetic construct
  source 1..23: mol_type = other RNA
tcgtttggcgatggcctcctccc

SEQ ID NO: 2044 - RNA, 23 nt, synthetic construct
  source 1..23: mol_type = other RNA
tctcggcgagccgtctacgtgtc

SEQ ID NO: 2045 - skipped

SEQ ID NO: 2046 - RNA, 23 nt, synthetic construct
  source 1..23: mol_type = other RNA
tgcccagtccgtgtctctgcgca

SEQ ID NO: 2047 - RNA, 53 nt, synthetic construct
  source 1..53: mol_type = other RNA
tgcgtttgtgcaatgggcggcgcagtgggccgcgcatgtatcgccacagatca

SEQ ID NO: 2048 - RNA, 53 nt, synthetic construct
  source 1..53: mol_type = other RNA
tcggaggccacggtcgccacagcaacgtggctgtttcactatggatgtcgggc

SEQ ID NO: 2049 - RNA, 53 nt, synthetic construct
  source 1..53: mol_type = other RNA
tctcggtcacgcacggcgcagctcggacaacccgacacgcattgctactccaa

SEQ ID NO: 2050 - RNA, 53 nt, synthetic construct
  source 1..53: mol_type = other RNA
ttgctccgtggtatcggtcccgagccatatcaggtttgccgccgcgcaaggga

SEQ ID NO: 2051 - RNA, 68 nt, synthetic construct
  source 1..68: mol_type = other RNA
ttgggtgtggcgccaacgggagtgcggcctgggtacctattattgcggccgttgtggtggagaggacc

SEQ ID NO: 2052 - RNA, 68 nt, synthetic construct
  source 1..68: mol_type = other RNA
tcgctggcgtcgtacgcggagtgtgcaagagctgggtggcgaaagtcaagcagaccctggctgcacca

SEQ ID NO: 2053 - RNA, 68 nt, synthetic construct
  source 1..68: mol_type = other RNA
tcggctgtggcaggccgggaagctccatgtacacgctgcaaggcgaagctacccagccgtcaggaaca

SEQ ID NO: 2054 - RNA, 68 nt, synthetic construct
  source 1..68: mol_type = other RNA
ttaccgggcagtgtcctttctgcgcagcagggtcgtaccggactacgcaggaggaaggcttccgcgtc

SEQ ID NO: 2055 - RNA, 68 nt, synthetic construct
  source 1..68: mol_type = other RNA
tacaacgcggatcagggcatccatccacagcgtgcgcgaacggcggtgtcccgagatgggtggtatgc

SEQ ID NO: 2056 - RNA, 68 nt, synthetic construct
  source 1..68: mol_type = other RNA
tcctctcgcctgaatcggactggacagcttcgtgggatggctcgaagagcctccggaggcggtctacc

SEQ ID NO: 2057 - RNA, 68 nt, synthetic construct
  source 1..68: mol_type = other RNA
ttgccgactgatactgcgtccttacgcccgattgcgttacaagggtgcaagcggacgcccgcgcagcc

SEQ ID NO: 2058 - RNA, 68 nt, synthetic construct
  source 1..68: mol_type = other RNA
tcccggagcgaaaccggccaacgaagcgaaagggtggccctgcagtggatatgtggcggctgtcttcc

SEQ ID NO: 2059 - RNA, 68 nt, synthetic construct
  source 1..68: mol_type = other RNA
tccagcaagaggcaacccacccacgcgaagccaccacttgcgccgacgacggaacctcgctcgatttc

SEQ ID NO: 2060 - RNA, 83 nt, synthetic construct
  source 1..83: mol_type = other RNA
tccgaggaggacagagccaaggacagcccttcctcaatctactcacgatcgacgtgcgcggccttgaagcggcgaggtcacgc

SEQ ID NO: 2061 - RNA, 83 nt, synthetic construct
  source 1..83: mol_type = other RNA
tcccgccttcacaccctcgagatactgcgcgctcagccttcacacctatcgcgcacagtcggaccgggctgtactggatggga

SEQ ID NO: 2062 - RNA, 83 nt, synthetic construct
  source 1..83: mol_type = other RNA
ttgcagccaattgtggcaacaccggaagccaaggcacaggatgccgatcgccggtgggcgcgccacttgctggccaagctatc

SEQ ID NO: 2063 - RNA, 83 nt, synthetic construct
  source 1..83: mol_type = other RNA
ttggccaaagacaccacgagaaatgcccaatcagggtggcagggactgccacgaagcggactgcgacgaaggcgcgcacagcc

SEQ ID NO: 2064 - RNA, 83 nt, synthetic construct
  source 1..83: mol_type = other RNA
ttactgagtggcccgtacgcgcagggccgtcggcagaactcagtgtcgaccgacggcagatggtccgtcttctggtcatccca

SEQ ID NO: 2065 - RNA, 83 nt, synthetic construct
  source 1..83: mol_type = other RNA
tcgcggcctgcggttcggtacgttgcgtttcaaaccggtcttcctgcacgtctgcttgcggagcttcgaaagtcgccggagcc

SEQ ID NO: 2066 - RNA, 83 nt, synthetic construct
  source 1..83: mol_type = other RNA
tggcgcctgagccgtttgaaagaggcactcgtgccatattgcctcgacgcctctggcaacgccactccggtgtcccgtgtgga

SEQ ID NO: 2067 - RNA, 83 nt, synthetic construct
  source 1..83: mol_type = other RNA
tcatacgcggcaatcgcgtccttctgtacggacccactacggttgccgctatgtcagagacggcggcgttgcacagccgtgcc

SEQ ID NO: 2068 - RNA, 83 nt, synthetic construct
  source 1..83: mol_type = other RNA
tcccactaccgtcagactcgctcagaacagaccagatcacggcggcgggatccgccttgtcaaggagagcggagcgtacaccc

SEQ ID NO: 2069 - RNA, 83 nt, synthetic construct
  source 1..83: mol_type = other RNA
tgggcgacttacgattggagcattctcctcggctttgttggctcagcgcgacccgctgggaggaggaggacacctgggagcga

SEQ ID NO: 2070 - RNA, 24 nt, synthetic construct
  source 1..24: mol_type = other RNA
acgatgatggtgatgatggtgtgc

SEQ ID NO: 2071 - RNA, 38 nt, synthetic construct
  source 1..38: mol_type = other RNA
atgatcctgacgacggagaccgccgtcgtcgacaagcc

SEQ ID NO: 2072 - RNA, 18 nt, synthetic construct
  source 1..18: mol_type = other RNA
aaagtctcatttgactta

SEQ ID NO: 2073 - RNA, 18 nt, synthetic construct
  source 1..18: mol_type = other RNA
aggcaggatcttgaaatt

SEQ ID NO: 2074 - RNA, 18 nt, synthetic construct
  source 1..18: mol_type = other RNA
gtacatggcagagagcaa

SEQ ID NO: 2075 - RNA, 15 nt, synthetic construct
  source 1..15: mol_type = other RNA
agaacggccaaaggt

SEQ ID NO: 2076 - RNA, 18 nt, synthetic construct
  source 1..18: mol_type = other RNA
acccaagaggagggcaga

SEQ ID NO: 2077 - RNA, 15 nt, synthetic construct
  source 1..15: mol_type = other RNA
ggacggcccgtacat

SEQ ID NO: 2078 - RNA, 18 nt, synthetic construct
  source 1..18: mol_type = other RNA
aggcctggcgtccaggcc

SEQ ID NO: 2079 - RNA, 15 nt, synthetic construct
  source 1..15: mol_type = other RNA
agccgccgtgcggca

SEQ ID NO: 2080 - RNA, 22 nt, synthetic construct
  source 1..22: mol_type = other RNA
tcatacacagagcaaactccaa

SEQ ID NO: 2081 - RNA, 20 nt, synthetic construct
  source 1..20: mol_type = other RNA
acagcaccatctagtgtaaa

SEQ ID NO: 2082 - RNA, 20 nt, synthetic construct
  source 1..20: mol_type = other RNA
ctcgtcactggatgtgaagt

SEQ ID NO: 2083 - RNA, 22 nt, synthetic construct
  source 1..22: mol_type = other RNA
ttgatgtcgtaggtgataccgc

SEQ ID NO: 2084 - RNA, 20 nt, synthetic construct
  source 1..20: mol_type = other RNA
ggatcgtccctcaggggcag

SEQ ID NO: 2085 - RNA, 23 nt, synthetic construct
  source 1..23: mol_type = other RNA
tcgtggtctcgggcatcagaccc

SEQ ID NO: 2086 - RNA, 20 nt, synthetic construct
  source 1..20: mol_type = other RNA
ccgcactcggcccgtggggc

SEQ ID NO: 2087 - RNA, 30 nt, synthetic construct
  source 1..30: mol_type = other RNA
gatttgataatctcgtatatagagcagtta

SEQ ID NO: 2088 - RNA, 30 nt, synthetic construct
  source 1..30: mol_type = other RNA
gtgtctcatgtttccttgtattacgttacc

SEQ ID NO: 2089 - RNA, 30 nt, synthetic construct
  source 1..30: mol_type = other RNA
gtaatccaagctcactaggggcacaacttg

SEQ ID NO: 2090 - RNA, 30 nt, synthetic construct
  source 1..30: mol_type = other RNA
ctatcatgcatggcgatcccaggttcgcgc

SEQ ID NO: 2091 - skipped

SEQ ID NO: 2092 - RNA, 38 nt, synthetic construct
  source 1..38: mol_type = other RNA
ggtaatagcatacagttgccggttgcaaatcttggaaa

SEQ ID NO: 2093 - RNA, 38 nt, synthetic construct
  source 1..38: mol_type = other RNA
tgtaatccgagtacgcttcgtgataaaccggaacaata

SEQ ID NO: 2094 - RNA, 38 nt, synthetic construct
  source 1..38: mol_type = other RNA
gataagtattgatatggaacgcatagggtggtgcgata

SEQ ID NO: 2095 - RNA, 38 nt, synthetic construct
  source 1..38: mol_type = other RNA
tgcggtgaataggttgaaagaaggatactgtagacgaa

SEQ ID NO: 2096 - RNA, 38 nt, synthetic construct
  source 1..38: mol_type = other RNA
gtggaaatcatccgccatgaagtattcacaccataaca

SEQ ID NO: 2097 - RNA, 38 nt, synthetic construct
  source 1..38: mol_type = other RNA
tggatcggcaatatgtttgcatgggcttcgtatacata

SEQ ID NO: 2098 - RNA, 38 nt, synthetic construct
  source 1..38: mol_type = other RNA
ggtaatcgcaaatgccaaataccatgtagacacggtaa

SEQ ID NO: 2099 - RNA, 38 nt, synthetic construct
  source 1..38: mol_type = other RNA
ttctgttggagtgcccgttggtatatgtaccttgtata

SEQ ID NO: 2100 - RNA, 38 nt, synthetic construct
  source 1..38: mol_type = other RNA
tccctctggacgtgtaaatttccaagtatacgcagtaa

SEQ ID NO: 2101 - RNA, 38 nt, synthetic construct
  source 1..38: mol_type = other RNA
ggcggtgccatatcctgaccgtataccctgtacataca

SEQ ID NO: 2102 - RNA, 38 nt, synthetic construct
  source 1..38: mol_type = other RNA
tgtccgtgcattcgagtacctgtacttgtcgagggtga

SEQ ID NO: 2103 - RNA, 38 nt, synthetic construct
  source 1..38: mol_type = other RNA
gctccagaatacgcctgagagagcgaaagctttcggaa

SEQ ID NO: 2104 - RNA, 38 nt, synthetic construct
  source 1..38: mol_type = other RNA
ggagcaacacgggttgagagcaattgatttctccgcca

SEQ ID NO: 2105 - RNA, 38 nt, synthetic construct
  source 1..38: mol_type = other RNA
gtatgggcctgcacgtggtaacaagatgaggaacgtga

SEQ ID NO: 2106 - RNA, 38 nt, synthetic construct
  source 1..38: mol_type = other RNA
gagcccacacatactcgtgtttggttcccttgacgaga

SEQ ID NO: 2107 - RNA, 38 nt, synthetic construct
  source 1..38: mol_type = other RNA
gagtgacaggaaaccctcgtatgtcggcgcacagtata

SEQ ID NO: 2108 - RNA, 38 nt, synthetic construct
  source 1..38: mol_type = other RNA
gccacaccacacccgtgagaaacgaaagattccagaga

SEQ ID NO: 2109 - RNA, 38 nt, synthetic construct
  source 1..38: mol_type = other RNA
gtggagcacacgaggactggttctggtgtacataggta

SEQ ID NO: 2110 - RNA, 38 nt, synthetic construct
  source 1..38: mol_type = other RNA
gtgtgggaggtcacaacctcgagtgtcgccctccggta

SEQ ID NO: 2111 - RNA, 38 nt, synthetic construct
  source 1..38: mol_type = other RNA
tgtgggcgtacaatactctcggccgcggacagggacga

SEQ ID NO: 2112 - RNA, 38 nt, synthetic construct
  source 1..38: mol_type = other RNA
gcggtggagcatacccagttccgcgcgatcgatcgtga

SEQ ID NO: 2113 - RNA, 38 nt, synthetic construct
  source 1..38: mol_type = other RNA
gggacggagccatgcaaatgcccgcatgcctccgagaa

SEQ ID NO: 2114 - RNA, 38 nt, synthetic construct
  source 1..38: mol_type = other RNA
ggcgcctttgccatggcgtgaacgcatagcggcagaga

SEQ ID NO: 2115 - RNA, 38 nt, synthetic construct
  source 1..38: mol_type = other RNA
ggatgaggccgaggcaggcagcatcggaccatcatgca

SEQ ID NO: 2116 - RNA, 38 nt, synthetic construct
  source 1..38: mol_type = other RNA
gaccgcccgttctgcatgtatgcgcaagcgtcgacgca

SEQ ID NO: 2117 - RNA, 38 nt, synthetic construct
  source 1..38: mol_type = other RNA
gtcaccaaggaccacggcttgggcctcgacagagctga

SEQ ID NO: 2118 - RNA, 38 nt, synthetic construct
  source 1..38: mol_type = other RNA
tcggttcgggcgaaacccaggagacgcgtaccggaaga

SEQ ID NO: 2119 - RNA, 38 nt, synthetic construct
  source 1..38: mol_type = other RNA
gtacagagctcggcccgagataccgccgcggtgcgcca

SEQ ID NO: 2120 - RNA, 38 nt, synthetic construct
  source 1..38: mol_type = other RNA
gccggcaggcccgcaggcgctgttcggctcaattggca

SEQ ID NO: 2121 - RNA, 38 nt, synthetic construct
  source 1..38: mol_type = other RNA
gccgtgcgtcgggcgaggtgccgggagcatgtgtgaca

SEQ ID NO: 2122 - RNA, 38 nt, synthetic construct
  source 1..38: mol_type = other RNA
gaggtgcccggtgccgctgaaagcagcgttcgcccgca

SEQ ID NO: 2123 - RNA, 38 nt, synthetic construct
  source 1..38: mol_type = other RNA
ttcgcccgggcccgtagagaaggctcggcgtgcggcaa

SEQ ID NO: 2124 - RNA, 38 nt, synthetic construct
  source 1..38: mol_type = other RNA
ggtgacgtttcccgtccctggacgcagcgtggcgggca

SEQ ID NO: 2125 - RNA, 38 nt, synthetic construct
  source 1..38: mol_type = other RNA
gccatgcaggcgtaacgcggagaggtccggccgccgta

SEQ ID NO: 2126 - RNA, 38 nt, synthetic construct
  source 1..38: mol_type = other RNA
ggcagcgtgcgcccggctgataggcggttctcgcagca

SEQ ID NO: 2127 - RNA, 38 nt, synthetic construct
  source 1..38: mol_type = other RNA
ggcaacgcgcggcaggcggccgataaagcctgggcaca

SEQ ID NO: 2128 - RNA, 38 nt, synthetic construct
  source 1..38: mol_type = other RNA
ggaaggcccgccgacggctcgggccgcaccgcgatgca

SEQ ID NO: 2129 - RNA, 38 nt, synthetic construct
  source 1..38: mol_type = other RNA
gccacgcggccgagtcgctcccgggccgggtgtgcgta

SEQ ID NO: 2130 - RNA, 38 nt, synthetic construct
  source 1..38: mol_type = other RNA
gccgcgctccgcgcgaggtgacggtccggagtcggcca

SEQ ID NO: 2131 - RNA, 38 nt, synthetic construct
  source 1..38: mol_type = other RNA
ggtctcgtgcggaggccacgcgcgcgtggtggcgcgca

SEQ ID NO: 2132 - RNA, 38 nt, synthetic construct
  source 1..38: mol_type = other RNA
ggccggccctcgccgccttctgggcggctcatccgcca

SEQ ID NO: 2133 - RNA, 38 nt, synthetic construct
  source 1..38: mol_type = other RNA
gccgtcttcccgggcccgcggcctcggtcgacctggca

SEQ ID NO: 2134 - RNA, 38 nt, synthetic construct
  source 1..38: mol_type = other RNA
tttccgggctccgcggcgcacatcccggcgccgggcga

SEQ ID NO: 2135 - RNA, 38 nt, synthetic construct
  source 1..38: mol_type = other RNA
gtgctcgccgggcacgtccgcgccagccgcggcttcga

SEQ ID NO: 2136 - RNA, 38 nt, synthetic construct
  source 1..38: mol_type = other RNA
gctgcccggcacgcgggcgtaccctgggcccgtacgga

SEQ ID NO: 2137 - RNA, 23 nt, synthetic construct
  source 1..23: mol_type = other RNA
gcggcccacagataagaggcgga

SEQ ID NO: 2138 - RNA, 23 nt, synthetic construct
  source 1..23: mol_type = other RNA
tcgcatggacccgacggttggca

SEQ ID NO: 2139 - RNA, 23 nt, synthetic construct
  source 1..23: mol_type = other RNA
ggcttgttgcgggtgcgctcgaa

SEQ ID NO: 2140 - RNA, 23 nt, synthetic construct
  source 1..23: mol_type = other RNA
ggttcgcaaccctgctgcgcgaa

SEQ ID NO: 2141 - RNA, 23 nt, synthetic construct
  source 1..23: mol_type = other RNA
gtacctgtcccgcaccggccaaa

SEQ ID NO: 2142 - RNA, 23 nt, synthetic construct
  source 1..23: mol_type = other RNA
gggaggaggccatcgccaaacga

SEQ ID NO: 2143 - RNA, 23 nt, synthetic construct
  source 1..23: mol_type = other RNA
gacacgtagacggctcgccgaga

SEQ ID NO: 2144 - skipped

SEQ ID NO: 2145 - RNA, 23 nt, synthetic construct
  source 1..23: mol_type = other RNA
tgcgcagagacacggactgggca

SEQ ID NO: 2146 - RNA, 53 nt, synthetic construct
  source 1..53: mol_type = other RNA
tgatctgtggcgatacatgcgcggcccactgcgccgcccattgcacaaacgca

SEQ ID NO: 2147 - RNA, 53 nt, synthetic construct
  source 1..53: mol_type = other RNA
gcccgacatccatagtgaaacagccacgttgctgtggcgaccgtggcctccga

SEQ ID NO: 2148 - RNA, 53 nt, synthetic construct
  source 1..53: mol_type = other RNA
ttggagtagcaatgcgtgtcgggttgtccgagctgcgccgtgcgtgaccgaga

SEQ ID NO: 2149 - RNA, 53 nt, synthetic construct
  source 1..53: mol_type = other RNA
tcccttgcgcggcggcaaacctgatatggctcgggaccgataccacggagcaa

SEQ ID NO: 2150 - RNA, 68 nt, synthetic construct
  source 1..68: mol_type = other RNA
ggtcctctccaccacaacggccgcaataataggtacccaggccgcactcccgttggcgccacacccaa

SEQ ID NO: 2151 - RNA, 68 nt, synthetic construct
  source 1..68: mol_type = other RNA
tggtgcagccagggtctgcttgactttcgccacccagctcttgcacactccgcgtacgacgccagcga

SEQ ID NO: 2152 - RNA, 68 nt, synthetic construct
  source 1..68: mol_type = other RNA
tgttcctgacggctgggtagcttcgccttgcagcgtgtacatggagcttcccggcctgccacagccga

SEQ ID NO: 2153 - RNA, 68 nt, synthetic construct
  source 1..68: mol_type = other RNA
gacgcggaagccttcctcctgcgtagtccggtacgaccctgctgcgcagaaaggacactgcccggtaa

SEQ ID NO: 2154 - RNA, 68 nt, synthetic construct
  source 1..68: mol_type = other RNA
gcataccacccatctcgggacaccgccgttcgcgcacgctgtggatggatgccctgatccgcgttgta

SEQ ID NO: 2155 - RNA, 68 nt, synthetic construct
  source 1..68: mol_type = other RNA
ggtagaccgcctccggaggctcttcgagccatcccacgaagctgtccagtccgattcaggcgagagga

SEQ ID NO: 2156 - RNA, 68 nt, synthetic construct
  source 1..68: mol_type = other RNA
ggctgcgcgggcgtccgcttgcacccttgtaacgcaatcgggcgtaaggacgcagtatcagtcggcaa

SEQ ID NO: 2157 - RNA, 68 nt, synthetic construct
  source 1..68: mol_type = other RNA
ggaagacagccgccacatatccactgcagggccaccctttcgcttcgttggccggtttcgctccggga

SEQ ID NO: 2158 - RNA, 68 nt, synthetic construct
  source 1..68: mol_type = other RNA
gaaatcgagcgaggttccgtcgtcggcgcaagtggtggcttcgcgtgggtgggttgcctcttgctgga

SEQ ID NO: 2159 - RNA, 83 nt, synthetic construct
  source 1..83: mol_type = other RNA
gcgtgacctcgccgcttcaaggccgcgcacgtcgatcgtgagtagattgaggaagggctgtccttggctctgtcctcctcgga

SEQ ID NO: 2160 - RNA, 83 nt, synthetic construct
  source 1..83: mol_type = other RNA
tcccatccagtacagcccggtccgactgtgcgcgataggtgtgaaggctgagcgcgcagtatctcgagggtgtgaaggcggga

SEQ ID NO: 2161 - RNA, 83 nt, synthetic construct
  source 1..83: mol_type = other RNA
gatagcttggccagcaagtggcgcgcccaccggcgatcggcatcctgtgccttggcttccggtgttgccacaattggctgcaa

SEQ ID NO: 2162 - RNA, 83 nt, synthetic construct
  source 1..83: mol_type = other RNA
ggctgtgcgcgccttcgtcgcagtccgcttcgtggcagtccctgccaccctgattgggcatttctcgtggtgtctttggccaa

SEQ ID NO: 2163 - RNA, 83 nt, synthetic construct
  source 1..83: mol_type = other RNA
tgggatgaccagaagacggaccatctgccgtcggtcgacactgagttctgccgacggccctgcgcgtacgggccactcagtaa

SEQ ID NO: 2164 - RNA, 83 nt, synthetic construct
  source 1..83: mol_type = other RNA
ggctccggcgactttcgaagctccgcaagcagacgtgcaggaagaccggtttgaaacgcaacgtaccgaaccgcaggccgcga

SEQ ID NO: 2165 - RNA, 83 nt, synthetic construct
  source 1..83: mol_type = other RNA
tccacacgggacaccggagtggcgttgccagaggcgtcgaggcaatatggcacgagtgcctctttcaaacggctcaggcgcca

SEQ ID NO: 2166 - RNA, 83 nt, synthetic construct
  source 1..83: mol_type = other RNA
ggcacggctgtgcaacgccgccgtctctgacatagcggcaaccgtagtgggtccgtacagaaggacgcgattgccgcgtatga

SEQ ID NO: 2167 - RNA, 83 nt, synthetic construct
  source 1..83: mol_type = other RNA
gggtgtacgctccgctctccttgacaaggcggatcccgccgccgtgatctggtctgttctgagcgagtctgacggtagtggga

SEQ ID NO: 2168 - RNA, 83 nt, synthetic construct
  source 1..83: mol_type = other RNA
tcgctcccaggtgtcctcctcctcccagcgggtcgcgctgagccaacaaagccgaggagaatgctccaatcgtaagtcgccca

SEQ ID NO: 2169 - RNA, 24 nt, synthetic construct
  source 1..24: mol_type = other RNA
gcacaccatcatcaccatcatcgt

SEQ ID NO: 2170 - RNA, 20 nt, synthetic construct
  source 1..20: mol_type = other RNA
aaaactctgctgatggccag

SEQ ID NO: 2171 - RNA, 25 nt, synthetic construct
  source 1..25: mol_type = other RNA
aattaaaaactctgctgatggccag

SEQ ID NO: 2172 - RNA, 30 nt, synthetic construct
  source 1..30: mol_type = other RNA
tcctaaattaaaaactctgctgatggccag

SEQ ID NO: 2173 - RNA, 20 nt, synthetic construct
  source 1..20: mol_type = other RNA
ggggtgaagacaagggcctc

SEQ ID NO: 2174 - RNA, 25 nt, synthetic construct
  source 1..25: mol_type = other RNA
gtgatggggtgaagacaagggcctc

SEQ ID NO: 2175 - RNA, 30 nt, synthetic construct
  source 1..30: mol_type = other RNA
gggcagtgatggggtgaagacaagggcctc

SEQ ID NO: 2176 - RNA, 20 nt, synthetic construct
  source 1..20: mol_type = other RNA
ctggccccagagtctgtgca

SEQ ID NO: 2177 - RNA, 25 nt, synthetic construct
  source 1..25: mol_type = other RNA
gctgtctggccccagagtctgtgca

SEQ ID NO: 2178 - RNA, 30 nt, synthetic construct
  source 1..30: mol_type = other RNA
cccaagctgtctggccccagagtctgtgca

SEQ ID NO: 2179 - RNA, 20 nt, synthetic construct
  source 1..20: mol_type = other RNA
aaatatctgacccagttacg

SEQ ID NO: 2180 - RNA, 25 nt, synthetic construct
  source 1..25: mol_type = other RNA
caaagaaatatctgacccagttacg

SEQ ID NO: 2181 - RNA, 30 nt, synthetic construct
  source 1..30: mol_type = other RNA
gggtacaaagaaatatctgacccagttacg

SEQ ID NO: 2182-2236 - skipped (55 entries)

SEQ ID NO: 2237 - RNA, 37 nt, synthetic construct
  source 1..37: mol_type = other RNA
cgcggttctatctagttacgcgttaaaccaactagaa

SEQ ID NO: 2238-2258 - skipped (21 entries)

SEQ ID NO: 2259 - RNA, 78 nt, synthetic construct
  source 1..78: mol_type = other RNA
gtttaagagcggggaaatccgcaagtttaaataaggctagtccgttatcagcgtgaaaacgcggcaccgagtcggtgc

SEQ ID NO: 2260 - RNA, 76 nt, synthetic construct
  source 1..76: mol_type = other RNA
gttttagagctagaaatagcaagttaaaataaggctagtccgttatcaacttgaaaaagtggcaccgagtcggtgc

SEQ ID NO: 2261 - RNA, 78 nt, synthetic construct
  source 1..78: mol_type = other RNA
gtataagagcggggaaatccgcatgtttatataaggctagtccgttatcagcgtgaaagcgcggcaccgaatcggtgt

SEQ ID NO: 2262 - RNA, 78 nt, synthetic construct
  source 1..78: mol_type = other RNA
gtataagagcggggaaatccgcatgtttatataaggctagtccgttatcagcgtgaaagcgcggcaccgagtcggtgt

SEQ ID NO: 2263 - RNA, 78 nt, synthetic construct
  source 1..78: mol_type = other RNA
gtttaagagcggggaaatccgcaagtttaaataaggctagtccgttatcagcgggaaaccgcggcaccgagtcggtgt

SEQ ID NO: 2264 - RNA, 78 nt, synthetic construct
  source 1..78: mol_type = other RNA
gtttaaaagcggggaaatccgcaagtttaaataaggctagtccgttatcagcgggaaaccgcggcaccaagttggtgt

SEQ ID NO: 2265 - RNA, 78 nt, synthetic construct
  source 1..78: mol_type = other RNA
gtataagagcggggaaatccgcaagtttatataaggctagtccgttatcagcgtgaaagcgcggcaccgagtcggtgc

SEQ ID NO: 2266 - RNA, 78 nt, synthetic construct
  source 1..78: mol_type = other RNA
gtataagagcggggaaatccgcaagtttatataaggctagtccgttatcagcgtgaaagcgcggcaccgaatcggtgt

SEQ ID NO: 2267 - RNA, 78 nt, synthetic construct
  source 1..78: mol_type = other RNA
gtataagagcggggaaatccgcaagtttatataagactagttcgttatcagcgtgaaaacgcggcaccgagtcggtgc

SEQ ID NO: 2268 - RNA, 78 nt, synthetic construct
  source 1..78: mol_type = other RNA
gtataagagcggggaaatccgcatgtttatataagactagttcgttctcagcgtgaaaacgcggcaccgagtcggtgc

SEQ ID NO: 2269 - RNA, 78 nt, synthetic construct
  source 1..78: mol_type = other RNA
gtataagagcggggaaatccgcatgtttatataagactagttcgttaccagcgtgaaaacgcggcaccgagtcggtgc

SEQ ID NO: 2270 - RNA, 78 nt, synthetic construct
  source 1..78: mol_type = other RNA
gtataagagcggggaaatccgcatgtttatataagactagttcgttagcagcgtgaaaacgcggcaccgagtcggtgc

SEQ ID NO: 2271 - RNA, 78 nt, synthetic construct; identical to SEQ ID NO: 2267
  source 1..78: mol_type = other RNA

SEQ ID NO: 2272 - RNA, 78 nt, synthetic construct; identical to SEQ ID NO: 2267
  source 1..78: mol_type = other RNA

SEQ ID NO: 2273 - RNA, 76 nt, synthetic construct
  source 1..76: mol_type = other RNA
gtttgagagctagaaatagcaagtttaaataaggctagtccgttatcaacttgaaaaagtgggaccgagtcggtcc

SEQ ID NO: 2274 - RNA, 86 nt, synthetic construct
  source 1..86: mol_type = other RNA
gtttaagagctatgctggaaacagcatagcaagtttaaataaggctagtccgttatcaacttgaaaaagtggcaccgagtcggtgc

SEQ ID NO: 2275 - RNA, 76 nt, synthetic construct
  source 1..76: mol_type = other RNA
gttttagtactctggaaacagaatctactaaaacaaggcaaaatgccgtgtttatctcgtcaacttgttggcgaga

SEQ ID NO: 2276 - RNA, 76 nt, synthetic construct
  source 1..76: mol_type = other RNA
gttttagtactctggaaacagaatctactgaaacaagacaatatgtcgtgtttatcccatcaatttattggtggga

SEQ ID NO: 2277 - RNA, 76 nt, synthetic construct
  source 1..76: mol_type = other RNA
gttttagagctatacgtagcaagttaaaataaggctagtccgttatcaactttacgaagtggcaccgagtcggtgc

SEQ ID NO: 2278 - RNA, 76 nt, synthetic construct
  source 1..76: mol_type = other RNA
gttttagagctatacgtagcaagttaaaataaggctagtccgttatcaactttacgaagtgggaccgagtcggtcc

SEQ ID NO: 2279 - RNA, 88 nt, synthetic construct
  source 1..88: mol_type = other RNA
gttttagagctagctcatgaaaatgagctagcaagttaaaataaggctagtccgttatcaacttgaaaaagtgggaccgagtcggtcc

SEQ ID NO: 2280 - RNA, 76 nt, synthetic construct
  source 1..76: mol_type = other RNA
gtttaagagctagaaatagcaagtttaaataaggctagtccgttatcaacttgaaaaagtggcaccgagtcggtgc

SEQ ID NO: 2281 - RNA, 86 nt, synthetic construct
  source 1..86: mol_type = other RNA
gttttagagctatgctggaaacagcatagcaagttaaaataaggctagtccgttatcaacttgaaaaagtggcaccgagtcggtgc

SEQ ID NO: 2282 - protein, 677 aa, Moloney murine leukemia virus
TLNIEDEHRLHETSKEPDVSLGSTWLSDFPQAWAETGGMGLAVRQAPLIIPLKATSTPVSIKQYPMSQEARLGIKPHIQRLLDQGILVPCQSPWNTPLLPVKKPGTNDYRPVQDLREVNKRVEDIHPTVPNPYNLLSGLPPSHQWYTVLDLKDAFFCLRLHPTSQPLFAFEWRDPEMGISGQLTWTRLPQGFKNSPTLFDEALHRDLADFRIQHPDLILLQYVDDLLLAATSELDCQQGTRALLQTLGNLGYRASAKKAQICQKQVKYLGYLLKEGQRWLTEARKETVMGQPTPKTPRQLREFLGTAGFCRLWIPGFAEMAAPLYPLTKTGTLFNWGPDQQKAYQEIKQALLTAPALGLPDLTKPFELFVDEKQGYAKGVLTQKLGPWRRPVAYLSKKLDPVAAGWPPCLRMVAAIAVLTKDAGKLTMGQPLVILAPHAVEALVKQPPDRWLSNARMTHYQALLLDTDRVQFGPVVALNPATLLPLPEEGLQHNCLDILAEAHGTRPDLTDQPLPDADHTWYTDGSSLLQEGQRKAGAAVTTETEVIWAKALPAGTSAQRAELIALTQALKMAEGKKLNVYTDSRYAFATAHIHGEIYRRRGLLTSEGKEIKNKDEILALLKALFLPKRLSIIHCPGHQKGHSAEARGNRMADQAARKAAITETPDTSTLLIENSSP

SEQ ID NO: 2283 - protein, 677 aa, synthetic construct
TLNIEDEYRLHETSKEPDVSLGSTWLSDFPQAWAETGGMGLAVRQAPLIIPLKATSTPVSIKQYPMSQEARLGIKPHIQRLLDQGILVPCQSPWNTPLLPVKKPGTNDYRPVQDLREVNKRVEDIHPTVPNPYNLLSGLPPSHQWYTVLDLKDAFFCLRLHPTSQPLFAFEWRDPEMGISGQLTWTRLPQGFKNSPTLFNEALHRDLADFRIQHPDLILLQYVDDLLLAATSELDCQQGTRALLQTLGNLGYRASAKKAQICQKQVKYLGYLLKEGQRWLTEARKETVMGQPTPKTPRQLREFLGKAGFCRLFIPGFAEMAAPLYPLTKPGTLFNWGPDQQKAYQEIKQALLTAPALGLPDLTKPFELFVDEKQGYAKGVLTQKLGPWRRPVAYLSKKLDPVAAGWPPCLRMVAAIAVLTKDAGKLTMGQPLVILAPHAVEALVKQPPDRWLSNARMTHYQALLLDTDRVQFGPVVALNPATLLPLPEEGLQHNCLDILAEAHGTRPDLTDQPLPDADHTWYTDGSSLLQEGQRKAGAAVTTETEVIWAKALPAGTSAQRAELIALTQALKMAEGKKLNVYTDSRYAFATAHIHGEIYRRRGWLTSEGKEIKNKDEILALLKALFLPKRLSIIHCPGHQKGHSAEARGNRMADQAARKAAITETPDTSTLLIENSSP

SEQ ID NO: 2284 - protein, 677 aa, synthetic construct
TLNIEDEYRLHETSKEPDVSLGSTWLSDFPQAWAETGGMGLAVRQAPLIIPLKATSTPVSIKQYPMSQEARLGIKPHIQRLLDQGILVPCQSPWNTPLLPVKKPGTNDYRPVQDLREVNKRVEDIHPTVPNPYNLLSGLPPSHQWYTVLDLKDAFFCLRLHPTSQPLFAFEWRDPEMGISGQLTWTRLPQGFKNSPTLFDEALHRDLADFRIQHPDLILLQYVDDLLLAATSELDCQQGTRALLQTLGNLGYRASAKKAQICQKQVKYLGYLLKEGQRWLTEARKETVMGQPTPKTPRQLREFLGTAGFCRLWIPGFAEMAAPLYPLTKTGTLFNWGPDQQKAYQEIKQALLTAPALGLPDLTKPFELFVDEKQGYAKGVLTQKLGPWRRPVAYLSKKLDPVAAGWPPCLRMVAAIAVLTKDAGKLTMGQPLVILAPHAVEALVKQPPDRWLSNARMTHYQALLLDTDRVQFGPVVALNPATLLPLPEEGLQHNCLDILAEAHGTRPDLTDQPLPDADHTWYTDGSSLLQEGQRKAGAAVTTETEVIWAKALPAGTSAQRAELIALTQALKMAEGKKLNVYTDSRYAFATAHIHGEIYRRRGLLTSEGKEIKNKDEILALLKALFLPKRLSIIHCPGHQKGHSAEARGNRMADQAARKAAITETPDTSTLLIENSSP

SEQ ID NO: 2285 - protein, 1368 aa, Streptococcus pyogenes [sequence omitted]

SEQ ID NO: 2286 - protein, 1054 aa, Staphylococcus lutrae
MNQKFILGLDIGITSVGYGLIDYETKNIIDAGVRLFPEANVENNEGRRSKRGSRRLKRRRIHRLERVKKLLEDYNLLDQSQIPQSTNPYAIRVKGLSEALSKDELVIALLHIAKRRGIHKIDVIDSNDDVGNELSTKEQLNKNSKLLKDKFVCQIQLERMNEGQVRGEKNRFKTADIIKEIIQLLNVQKNFHQLDENFINKYIELVEMRREYFEGPGKGSPYGWEGDPKAWYETLMGHCTYFPDELRSVKYAYSADLFNALNDLNNLVIQRDGLSKLEYHEKYHIIENVFKQKKKPTLKQIANEINVNPEDIKGYRITKSGKPQFTEFKLYHDLKSVLFDQSILENEDVLDQIAEILTIYQDKDSIKSKLTELDILLNEEDKENIAQLTGYTGTHRLSLKCIRLVLEEQWYSSRNQMEIFTHLNIKPKKINLTAANKIPKAMIDEFILSPVVKRTFGQAINLINKIIEKYGVPEDIIIELARENNSKDKQKFINEMQKKNENTRKRINEIIGKYGNQNAKRLVEKIRLHDEQEGKCLYSLESIPLEDLLNNPNHYEVDHIIPRSVSFDNSYHNKVLVKQSENSKKSNLTPYQYFNSGKSKLSYNQFKQHILNLSKSQDRISKKKKEYLLEERDINKFEVQKEFINRNLVDTRYATRELTNYLKAYFSANNMNVKVKTINGSFTDYLRKVWKFKKERNHGYKHHAEDALIIANADFLFKENKKLKAVNSVLEKPEIESKQLDIQVDSEDNYSEMFIIPKQVQDIKDFRNFKYSHRVDKKPNRQLINDTLYSTRKKDNSTYIVQTIKDIYAKDNTTLKKQFDKSPEKFLMYQHDPRTFEKLEVIMKQYANEKNPLAKYHEETGEYLTKYSKKNNGPIVKSLKYIGNKLGSHLDVTHQFKSSTKKLVKLSIKPYRFDVYLTDKGYKFITISYLDVLKKDNYYYIPEQKYDKLKLGKAIDKNAKFIASFYKNDLIKLDGEIYKIIGVNSDTRNMIELDLPDIRYKEYCELNNIKGEPRIKKTIGKKVNSIEKLTTDVLGNVFTNTQYTKPQLLFKRGN

SEQ ID NO: 2287 - protein, 1368 aa, synthetic construct
MDKKYSIGLDIGTNSVGWAVITDEYKVPSKKFKVLGNTDRHSIKKNLIGALLFDSGETAEATRLKRTARRRYTRRKNRICYLQEIFSNEMAKVDDSFFHRLEESFLVEEDKKHERHPIFGNIVDEVAYHEKYPTIYHLRKKLVDSTDKADLRLIYLALAHMIKFRGHFLIEGDLNPDNSDVDKLFIQLVQTYNQLFEENPINASGVDAKAILSARLSKSRRLENLIAQLPGEKKNGLFGNLIALSLGLTPNFKSNFDLAEDAKLQLSKDTYDDDLDNLLAQIGDQYADLFLAAKNLSDAILLSDILRVNTEITKAPLSASMIKRYDEHHQDLTLLKALVRQQLPEKYKEIFFDQSKNGYAGYIDGGASQEEFYKFIKPILEKMDGTEELLVKLNREDLLRKQRTFDNGSIPHQIHLGELHAILRRQEDFYPFLKDNREKIEKILTFRIPYYVGPLARGNSRFAWMTRKSEETITPWNFEEVVDKGASAQSFIERMTNFDKNLPNEKVLPKHSLLYEYFTVYNELTKVKYVTEGMRKPAFLSGEQKKAIVDLLFKTNRKVTVKQLKEDYFKKIECFDSVEISGVEDRFNASLGTYHDLLKIIKDKDFLDNEENEDILEDIVLTLTLFEDREMIEERLKTYAHLFDDKVMKQLKRRRYTGWGRLSRKLINGIRDKQSGKTILDFLKSDGFANRNFMQLIHDDSLTFKEDIQKAQVSGQGDSLHEHIANLAGSPAIKKGILQTVKVVDELVKVMGRHKPENIVIEMARENQTTQKGQKNSRERMKRIEEGIKELGSQILKEHPVENTQLQNEKLYLYYLQNGRDMYVDQELDINRLSDYDVDAIVPQSFLKDDSIDNKVLTRSDKNRGKSDNVPSEEVVKKMKNYWRQLLNAKLITQRKFDNLTKAERGGLSELDKAGFIKRQLVETRQITKHVAQILDSRMNTKYDENDKLIREVKVITLKSKLVSDFRKDFQFYKVREINNYHHAHDAYLNAVVGTALIKKYPKLESEFVYGDYKVYDVRKMIAKSEQEIGKATAKYFFYSNIMNFFKTEITLANGEIRKRPLIETNGETGEIVWDKGRDFATVRKVLSMPQVNIVKKTEVQTGGFSKESILPKRNSDKLIARKKDWDPKKYGGFDSPTVAYSVLVVAKVEKGKSKKLKSVKELLGITIMERSSFEKNPIDFLEAKGYKEVKKDLIIKLPKYSLFELENGRKRMLASAGELQKGNELALPSKYVNFLYLASHYEKLKGSPEDNEQKQLFVEQHKHYLDEIIEQISEFSKRVILADANLDKVLSAYNKHRDKPIREQAENIIHLFTLTNLGAPAAFKYFDTTIDRKRYTSTKEVLDATLIHQSITGLYETRIDLSQLGGD

SEQ ID NO: 2288 - protein, 1367 aa, synthetic construct
DKKYSIGLDIGTNSVGWAVITDEYKVPSKKFKVLGNTDRHSIKKNLIGALLFDSGETAEATRLKRTARRRYTRRKNRICYLQEIFSNEMAKVDDSFFHRLEESFLVEEDKKHERHPIFGNIVDEVAYHEKYPTIYHLRKKLVDSTDKADLRLIYLALAHMIKFRGHFLIEGDLNPDNSDVDKLFIQLVQTYNQLFEENPINASGVDAKAILSARLSKSRRLENLIAQLPGEKKNGLFGNLIALSLGLTPNFKSNFDLAEDAKLQLSKDTYDDDLDNLLAQIGDQYADLFLAAKNLSDAILLSDILRVNTEITKAPLSASMIKRYDEHHQDLTLLKALVRQQLPEKYKEIFFDQSKNGYAGYIDGGASQEEFYKFIKPILEKMDGTEELLVKLNREDLLRKQRTFDNGSIPHQIHLGELHAILRRQEDFYPFLKDNREKIEKILTFRIPYYVGPLARGNSRFAWMTRKSEETITPWNFEEVVDKGASAQSFIERMTNFDKNLPNEKVLPKHSLLYEYFTVYNELTKVKYVTEGMRKPAFLSGEQKKAIVDLLFKTNRKVTVKQLKEDYFKKIECFDSVEISGVEDRFNASLGTYHDLLKIIKDKDFLDNEENEDILEDIVLTLTLFEDREMIEERLKTYAHLFDDKVMKQLKRRRYTGWGRLSRKLINGIRDKQSGKTILDFLKSDGFANRNFMQLIHDDSLTFKEDIQKAQVSGQGDSLHEHIANLAGSPAIKKGILQTVKVVDELVKVMGRHKPENIVIEMARENQTTQKGQKNSRERMKRIEEGIKELGSQILKEHPVENTQLQNEKLYLYYLQNGRDMYVDQELDINRLSDYDVDAIVPQSFLKDDSIDNKVLTRSDKNRGKSDNVPSEEVVKKMKNYWRQLLNAKLITQRKFDNLTKAERGGLSELDKAGFIKRQLVETRQITKHVAQILDSRMNTKYDENDKLIREVKVITLKSKLVSDFRKDFQFYKVREINNYHHAHDAYLNAVVGTALIKKYPKLESEFVYGDYKVYDVRKMIAKSEQEIGKATAKYFFYSNIMNFFKTEITLANGEIRKRPLIETNGETGEIVWDKGRDFATVRKVLSMPQVNIVKKTEVQTGGFSKESILPKRNSDKLIARKKDWDPKKYGGFDSPTVAYSVLVVAKVEKGKSKKLKSVKELLGITIMERSSFEKNPIDFLEAKGYKEVKKDLIIKLPKYSLFELENGRKRMLASAGELQKGNELALPSKYVNFLYLASHYEKLKGSPEDNEQKQLFVEQHKHYLDEIIEQISEFSKRVILADANLDKVLSAYNKHRDKPIREQAENIIHLFTLTNLGAPAAFKYFDTTIDRKRYTSTKEVLDATLIHQSITGLYETRIDLSQLGGD

SEQ ID NO: 2289 - protein, 1367 aa, synthetic construct
DKKYSIGLDIGTNSVGWAVITDEYKVPSKKFKVLGNTDRHSIKKNLIGALLFDSGETAEATRLKRTARRRYTRRKNRICYLQEIFSNEMAKVDDSFFHRLEESFLVEEDKKHERHPIFGNIVDEVAYHEKYPTIYHLRKKLVDSTDKADLRLIYLALAHMIKFRGHFLIEGDLNPDNSDVDKLFIQLVQTYNQLFEENPINASGVDAKAILSARLSKSRKLENLIAQLPGEKKNGLFGNLIALSLGLTPNFKSNFDLAEDAKLQLSKDTYDDDLDNLLAQIGDQYADLFLAAKNLSDAILLSDILRVNTEITKAPLSASMIKRYDEHHQDLTLLKALVRQQLPEKYKEIFFDQSKNGYAGYIDGGASQEEFYKFIKPILEKMDGTEELLVKLKREDLLRKQRTFDNGSIPHQIHLGELHAILRRQEDFYPFLKDNREKIEKILTFRIPYYVGPLARGNSRFAWMTRKSEETITPWNFEEVVDKGASAQSFIERMTNFDKNLPNEKVLPKHSLLYEYFTVYNELTKVKYVTEGMRKPAFLSGEQKKAIVDLLFKTNRKVTVKQLKEDYFKKIECFDSVEISGVEDRFNASLGTYHDLLKIIKDKDFLDNEENEDILEDIVLTLTLFEDREMIEERLKTYAHLFDDKVMKQLKRRRYTGWGRLSRKLINGIRDKQSGKTILDFLKSDGFANRNFMQLIHDDSLTFKEDIQKAQVSGQGDSLHEHIANLAGSPAIKKGILQTVKVVDELVKVMGRHKPENIVIEMARENQTTQKGQKNSRERMKRIEEGIKELGSQILKEHPVENTQLQNEKLYLYYLQNGRDMYVDQELDINRLSDYDVDAIVPQSFLKDDSIDNKVLTRSDKNRGKSDNVPSEEVVKKMKNYWRQLLNAKLITQRKFDNLTKAERGGLSELDKAGFIKRQLVETRQITKHVAQILDSRMNTKYDENDKLIREVKVITLKSKLVSDFRKDFQFYKVREINNYHHAHDAYLNAVVGTALIKKYPKLESEFVYGDYKVYDVRKMIAKSEQEIGKATAKYFFYSNIMNFFKTEITLANGEIRKRPLIETNGETGEIVWDKGRDFATVRKVLSMPQVNIVKKTEVQTGGFSKESILPKRNSDKLIARKKDWDPKKYGGFDSPTVAYSVLVVAKVEKGKSKKLKSVKELLGITIMERSSFEKNPIDFLEAKGYKEVKKDLIIKLPKYSLFELENGRKRMLASAGELQKGNELALPSKYVNFLYLASHYEKLKGSPEDNEQKQLFVEQHKHYLDEIIEQISEFSKRVILADANLDKVLSAYNKHRDKPIREQAENIIHLFTLTNLGAPAAFKYFDTTIDRKRYTSTKEVLDATLIHQSITGLYETRIDLSQLGGD

SEQ ID NO: 2290 - protein, 1054 aa, synthetic construct
MNQKFILGLDIGITSVGYGLIDYETKNIIDAGVRLFPEANVENNEGRRSKRGSRRLKRRRIHRLERVKKLLEDYNLLDQSQIPQSTNPYAIRVKGLSEALSKDELVIALLHIAKRRGIHKIDVIDSNDDVGNELSTKEQLNKNSKLLKDKFVCQIQLERMNEGQVRGEKNRFKTADIIKEIIQLLNVQKNFHQLDENFINKYIELVEMRREYFEGPGKGSPYGWEGDPKAWYETLMGHCTYFPDELRSVKYAYSADLFNALNDLNNLVIQRDGLSKLEYHEKYHIIENVFKQKKKPTLKQIANEINVNPEDIKGYRITKSGKPQFTEFKLYHDLKSVLFDQSILENEDVLDQIAEILTIYQDKDSIKSKLTELDILLNEEDKENIAQLTGYTGTHRLSLKCIRLVLEEQWYSSRNQMEIFTHLNIKPKKINLTAANKIPKAMIDEFILSPVVKRTFGQAINLINKIIEKYGVPEDIIIELARENNSKDKQKFINEMQKKNENTRKRINEIIGKYGNQNAKRLVEKIRLHDEQEGKCLYSLESIPLEDLLNNPNHYEVDHIIPRSVSFDNSYHNKVLVKQSEASKKSNLTPYQYFNSGKSKLSYNQFKQHILNLSKSQDRISKKKKEYLLEERDINKFEVQKEFINRNLVDTRYATRELTNYLKAYFSANNMNVKVKTINGSFTDYLRKVWKFKKERNHGYKHHAEDALIIANADFLFKENKKLKAVNSVLEKPEIESKQLDIQVDSEDNYSEMFIIPKQVQDIKDFRNFKYSHRVDKKPNRQLINDTLYSTRKKDNSTYIVQTIKDIYAKDNTTLKKQFDKSPEKFLMYQHDPRTFEKLEVIMKQYANEKNPLAKYHEETGEYLTKYSKKNNGPIVKSLKYIGNKLGSHLDVTHQFKSSTKKLVKLSIKPYRFDVYLTDKGYKFITISYLDVLKKDNYYYIPEQKYDKLKLGKAIDKNAKFIASFYKNDLIKLDGEIYKIIGVNSDTRNMIELDLPDIRYKEYCELNNIKGEPRIKKTIGKKVNSIEKLTTDVLGNVFTNTQYTKPQLLFKRGN

SEQ ID NO: 2291 - protein, 1053 aa, synthetic construct
NQKFILGLDIGITSVGYGLIDYETKNIIDAGVRLFPEANVENNEGRRSKRGSRRLKRRRIHRLERVKKLLEDYNLLDQSQIPQSTNPYAIRVKGLSEALSKDELVIALLHIAKRRGIHKIDVIDSNDDVGNELSTKEQLNKNSKLLKDKFVCQIQLERMNEGQVRGEKNRFKTADIIKEIIQLLNVQKNFHQLDENFINKYIELVEMRREYFEGPGKGSPYGWEGDPKAWYETLMGHCTYFPDELRSVKYAYSADLFNALNDLNNLVIQRDGLSKLEYHEKYHIIENVFKQKKKPTLKQIANEINVNPEDIKGYRITKSGKPQFTEFKLYHDLKSVLFDQSILENEDVLDQIAEILTIYQDKDSIKSKLTELDILLNEEDKENIAQLTGYTGTHRLSLKCIRLVLEEQWYSSRNQMEIFTHLNIKPKKINLTAANKIPKAMIDEFILSPVVKRTFGQAINLINKIIEKYGVPEDIIIELARENNSKDKQKFINEMQKKNENTRKRINEIIGKYGNQNAKRLVEKIRLHDEQEGKCLYSLESIPLEDLLNNPNHYEVDHIIPRSVSFDNSYHNKVLVKQSEASKKSNLTPYQYFNSGKSKLSYNQFKQHILNLSKSQDRISKKKKEYLLEERDINKFEVQKEFINRNLVDTRYATRELTNYLKAYFSANNMNVKVKTINGSFTDYLRKVWKFKKERNHGYKHHAEDALIIANADFLFKENKKLKAVNSVLEKPEIESKQLDIQVDSEDNYSEMFIIPKQVQDIKDFRNFKYSHRVDKKPNRQLINDTLYSTRKKDNSTYIVQTIKDIYAKDNTTLKKQFDKSPEKFLMYQHDPRTFEKLEVIMKQYANEKNPLAKYHEETGEYLTKYSKKNNGPIVKSLKYIGNKLGSHLDVTHQFKSSTKKLVKLSIKPYRFDVYLTDKGYKFITISYLDVLKKDNYYYIPEQKYDKLKLGKAIDKNAKFIASFYKNDLIKLDGEIYKIIGVNSDTRNMIELDLPDIRYKEYCELNNIKGEPRIKKTIGKKVNSIEKLTTDVLGNVFTNTQYTKPQLLFKRGN

SEQ ID NO: 2292 - protein, 1368 aa, synthetic construct
MDKKYSIGLDIGTNSVGWAVITDEYKVPSKKFKVLGNTDRHSIKKNLIGALLFDSGETAEATRLKRTARRRYTRRKNRICYLQEIFSNEMAKVDDSFFHRLEESFLVEEDKKHERHPIFGNIVDEVAYHEKYPTIYHLRKKLVDSTDKADLRLIYLALAHMIKFRGHFLIEGDLNPDNSDVDKLFIQLVQTYNQLFEENPINASGVDAKAILSARLSKSRRLENLIAQLPGEKKNGLFGNLIALSLGLTPNFKSNFDLAEDAKLQLSKDTYDDDLDNLLAQIGDQYADLFLAAKNLSDAILLSDILRVNTEITKAPLSASMIKRYDEHHQDLTLLKALVRQQLPEKYKEIFFDQSKNGYAGYIDGGASQEEFYKFIKPILEKMDGTEELLVKLNREDLLRKQRTFDNGSIPHQIHLGELHAILRRQEDFYPFLKDNREKIEKILTFRIPYYVGPLARGNSRFAWMTRKSEETITPWNFEEVVDKGASAQSFIERMTNFDKNLPNEKVLPKHSLLYEYFTVYNELTKVKYVTEGMRKPAFLSGEQKKAIVDLLFKTNRKVTVKQLKEDYFKKIECFDSVEISGVEDRFNASLGTYHDLLKIIKDKDFLDNEENEDILEDIVLTLTLFEDREMIEERLKTYAHLFDDKVMKQLKRRRYTGWGRLSRKLINGIRDKQSGKTILDFLKSDGFANRNFMQLIHDDSLTFKEDIQKAQVSGQGDSLHEHIANLAGSPAIKKGILQTVKVVDELVKVMGRHKPENIVIEMARENQTTQKGQKNSRERMKRIEEGIKELGSQILKEHPVENTQLQNEKLYLYYLQNGRDMYVDQELDINRLSDYDVDHIVPQSFLKDDSIDNKVLTRSDKNRGKSDNVPSEEVVKKMKNYWRQLLNAKLITQRKFDNLTKAERGGLSELDKAGFIKRQLVETRQITKHVAQILDSRMNTKYDENDKLIREVKVITLKSKLVSDFRKDFQFYKVREINNYHHAHDAYLNAVVGTALIKKYPKLESEFVYGDYKVYDVRKMIAKSEQEIGKATAKYFFYSNIMNFFKTEITLANGEIRKRPLIETNGETGEIVWDKGRDFATVRKVLSMPQVNIVKKTEVQTGGFSKESIRPKRNSDKLIARKKDWDPKKYGGFVSPTVAYSVLVVAKVEKGKSKKLKSVKELLGITIMERSSFEKNPIDFLEAKGYKEVKKDLIIKLPKYSLFELENGRKRMLASARFLQKGNELALPSKYVNFLYLASHYEKLKGSPEDNEQKQLFVEQHKHYLDEIIEQISEFSKRVILADANLDKVLSAYNKHRDKPIREQAENIIHLFTLTNLGAPRAFKYFDTTIDRKVYRSTKEVLDATLIHQSITGLYETRIDLSQLGGD

SEQ ID NO: 2293 - protein, 1368 aa, synthetic construct
MDKKYSIGLDIGTNSVGWAVITDEYKVPSKKFKVLGNTDRHSIKKNLIGALLFDSGETAEATRLKRTARRRYTRRKNRICYLQEIFSNEMAKVDDSFFHRLEESFLVEEDKKHERHPIFGNIVDEVAYHEKYPTIYHLRKKLVDSTDKADLRLIYLALAHMIKFRGHFLIEGDLNPDNSDVDKLFIQLVQTYNQLFEENPINASGVDAKAILSARLSKSRRLENLIAQLPGEKKNGLFGNLIALSLGLTPNFKSNFDLAEDAKLQLSKDTYDDDLDNLLAQIGDQYADLFLAAKNLSDAILLSDILRVNTEITKAPLSASMIKRYDEHHQDLTLLKALVRQQLPEKYKEIFFDQSKNGYAGYIDGGASQEEFYKFIKPILEKMDGTEELLVKLNREDLLRKQRTFDNGSIPHQIHLGELHAILRRQEDFYPFLKDNREKIEKILTFRIPYYVGPLARGNSRFAWMTRKSEETITPWNFEEVVDKGASAQSFIERMTNFDKNLPNEKVLPKHSLLYEYFTVYNELTKVKYVTEGMRKPAFLSGEQKKAIVDLLFKTNRKVTVKQLKEDYFKKIECFDSVEISGVEDRFNASLGTYHDLLKIIKDKDFLDNEENEDILEDIVLTLTLFEDREMIEERLKTYAHLFDDKVMKQLKRRRYTGWGRLSRKLINGIRDKQSGKTILDFLKSDGFANRNFMQLIHDDSLTFKEDIQKAQVSGQGDSLHEHIANLAGSPAIKKGILQTVKVVDELVKVMGRHKPENIVIEMARENQTTQKGQKNSRERMKRIEEGIKELGSQILKEHPVENTQLQNEKLYLYYLQNGRDMYVDQELDINRLSDYDVDAIVPQSFLKDDSIDNKVLTRSDKNRGKSDNVPSEEVVKKMKNYWRQLLNAKLITQRKFDNLTKAERGGLSELDKAGFIKRQLVETRQITKHVAQILDSRMNTKYDENDKLIREVKVITLKSKLVSDFRKDFQFYKVREINNYHHAHDAYLNAVVGTALIKKYPKLESEFVYGDYKVYDVRKMIAKSEQEIGKATAKYFFYSNIMNFFKTEITLANGEIRKRPLIETNGETGEIVWDKGRDFATVRKVLSMPQVNIVKKTEVQTGGFSKESIRPKRNSDKLIARKKDWDPKKYGGFVSPTVAYSVLVVAKVEKGKSKKLKSVKELLGITIMERSSFEKNPIDFLEAKGYKEVKKDLIIKLPKYSLFELENGRKRMLASARFLQKGNELALPSKYVNFLYLASHYEKLKGSPEDNEQKQLFVEQHKHYLDEIIEQISEFSKRVILADANLDKVLSAYNKHRDKPIREQAENIIHLFTLTNLGAPRAFKYFDTTIDRKVYRSTKEVLDATLIHQSITGLYETRIDLSQLGGD

SEQ ID NO: 2294 - protein, 1367 aa, synthetic construct
DKKYSIGLDIGTNSVGWAVITDEYKVPSKKFKVLGNTDRHSIKKNLIGALLFDSGETAEATRLKRTARRRYTRRKNRICYLQEIFSNEMAKVDDSFFHRLEESFLVEEDKKHERHPIFGNIVDEVAYHEKYPTIYHLRKKLVDSTDKADLRLIYLALAHMIKFRGHFLIEGDLNPDNSDVDKLFIQLVQTYNQLFEENPINASGVDAKAILSARLSKSRRLENLIAQLPGEKKNGLFGNLIALSLGLTPNFKSNFDLAEDAKLQLSKDTYDDDLDNLLAQIGDQYADLFLAAKNLSDAILLSDILRVNTEITKAPLSASMIKRYDEHHQDLTLLKALVRQQLPEKYKEIFFDQSKNGYAGYIDGGASQEEFYKFIKPILEKMDGTEELLVKLNREDLLRKQRTFDNGSIPHQIHLGELHAILRRQEDFYPFLKDNREKIEKILTFRIPYYVGPLARGNSRFAWMTRKSEETITPWNFEEVVDKGASAQSFIERMTNFDKNLPNEKVLPKHSLLYEYFTVYNELTKVKYVTEGMRKPAFLSGEQKKAIVDLLFKTNRKVTVKQLKEDYFKKIECFDSVEISGVEDRFNASLGTYHDLLKIIKDKDFLDNEENEDILEDIVLTLTLFEDREMIEERLKTYAHLFDDKVMKQLKRRRYTGWGRLSRKLINGIRDKQSGKTILDFLKSDGFANRNFMQLIHDDSLTFKEDIQKAQVSGQGDSLHEHIANLAGSPAIKKGILQTVKVVDELVKVMGRHKPENIVIEMARENQTTQKGQKNSRERMKRIEEGIKELGSQILKEHPVENTQLQNEKLYLYYLQNGRDMYVDQELDINRLSDYDVDAIVPQSFLKDDSIDNKVLTRSDKNRGKSDNVPSEEVVKKMKNYWRQLLNAKLITQRKFDNLTKAERGGLSELDKAGFIKRQLVETRQITKHVAQILDSRMNTKYDENDKLIREVKVITLKSKLVSDFRKDFQFYKVREINNYHHAHDAYLNAVVGTALIKKYPKLESEFVYGDYKVYDVRKMIAKSEQEIGKATAKYFFYSNIMNFFKTEITLANGEIRKRPLIETNGETGEIVWDKGRDFATVRKVLSMPQVNIVKKTEVQTGGFSKESIRPKRNSDKLIARKKDWDPKKYGGFVSPTVAYSVLVVAKVEKGKSKKLKSVKELLGITIMERSSFEKNPIDFLEAKGYKEVKKDLIIKLPKYSLFELENGRKRMLASARFLQKGNELALPSKYVNFLYLASHYEKLKGSPEDNEQKQLFVEQHKHYLDEIIEQISEFSKRVILADANLDKVLSAYNKHRDKPIREQAENIIHLFTLTNLGAPRAFKYFDTTIDRKVYRSTKEVLDATLIHQSITGLYETRIDLSQLGGD

SEQ ID NO: 2295 - protein, 1368 aa, synthetic construct
MDKKYSIGLDIGTNSVGWAVITDEYKVPSKKFKVLGNTDRHSIKKNLIGALLFDSGETAEATRLKRTARRRYTRRKNRICYLQEIFSNEMAKVDDSFFHRLEESFLVEEDKKHERHPIFGNIVDEVAYHEKYPTIYHLRKKLVDSTDKADLRLIYLALAHMIKFRGHFLIEGDLNPDNSDVDKLFIQLVQTYNQLFEENPINASGVDAKAILSARLSKSRRLENLIAQLPGEKKNGLFGNLIALSLGLTPNFKSNFDLAEDAKLQLSKDTYDDDLDNLLAQIGDQYADLFLAAKNLSDAILLSDILRVNTEITKAPLSASMIKRYDEHHQDLTLLKALVRQQLPEKYKEIFFDQSKNGYAGYIDGGASQEEFYKFIKPILEKMDGTEELLVKLNREDLLRKQRTFDNGSIPHQIHLGELHAILRRQEDFYPFLKDNREKIEKILTFRIPYYVGPLARGNSRFAWMTRKSEETITPWNFEEVVDKGASAQSFIERMTNFDKNLPNEKVLPKHSLLYEYFTVYNELTKVKYVTEGMRKPAFLSGEQKKAIVDLLFKTNRKVTVKQLKEDYFKKIECFDSVEISGVEDRFNASLGTYHDLLKIIKDKDFLDNEENEDILEDIVLTLTLFEDREMIEERLKTYAHLFDDKVMKQLKRRRYTGWGRLSRKLINGIRDKQSGKTILDFLKSDGFANRNFMQLIHDDSLTFKEDIQKAQVSGQGDSLHEHIANLAGSPAIKKGILQTVKVVDELVKVMGRHKPENIVIEMARENQTTQKGQKNSRERMKRIEEGIKELGSQILKEHPVENTQLQNEKLYLYYLQNGRDMYVDQELDINRLSDYDVDHIVPQSFLKDDSIDNKVLTRSDKNRGKSDNVPSEEVVKKMKNYWRQLLNAKLITQRKFDNLTKAERGGLSELDKAGFIKRQLVETRQITKHVAQILDSRMNTKYDENDKLIREVKVITLKSKLVSDFRKDFQFYKVREINNYHHAHDAYLNAVVGTALIKKYPKLESEFVYGDYKVYDVRKMIAKSEQEIGKATAKYFFYSNIMNFFKTEITLANGEIRKRPLIETNGETGEIVWDKGRDFATVRKVLSMPQVNIVKKTEVQTGGFSKESILPKRNSDKLIARKKDWDPKKYGGFVSPTVAYSVLVVAKVEKGKSKKLKSVKELLGITIMERSSFEKNPIDFLEAKGYKEVKKDLIIKLPKYSLFELENGRKRMLASARELQKGNELALPSKYVNFLYLASHYEKLKGSPEDNEQKQLFVEQHKHYLDEIIEQISEFSKRVILADANLDKVLSAYNKHRDKPIREQAENIIHLFTLTNLGAPAAFKYFDTTIDRKQYRSTKEVLDATLIHQSITGLYETRIDLSQLGGD

SEQ ID NO: 2296 - protein, 1368 aa, synthetic construct
MDKKYSIGLDIGTNSVGWAVITDEYKVPSKKFKVLGNTDRHSIKKNLIGALLFDSGETAEATRLKRTARRRYTRRKNRICYLQEIFSNEMAKVDDSFFHRLEESFLVEEDKKHERHPIFGNIVDEVAYHEKYPTIYHLRKKLVDSTDKADLRLIYLALAHMIKFRGHFLIEGDLNPDNSDVDKLFIQLVQTYNQLFEENPINASGVDAKAILSARLSKSRRLENLIAQLPGEKKNGLFGNLIALSLGLTPNFKSNFDLAEDAKLQLSKDTYDDDLDNLLAQIGDQYADLFLAAKNLSDAILLSDILRVNTEITKAPLSASMIKRYDEHHQDLTLLKALVRQQLPEKYKEIFFDQSKNGYAGYIDGGASQEEFYKFIKPILEKMDGTEELLVKLNREDLLRKQRTFDNGSIPHQIHLGELHAILRRQEDFYPFLKDNREKIEKILTFRIPYYVGPLARGNSRFAWMTRKSEETITPWNFEEVVDKGASAQSFIERMTNFDKNLPNEKVLPKHSLLYEYFTVYNELTKVKYVTEGMRKPAFLSGEQKKAIVDLLFKTNRKVTVKQLKEDYFKKIECFDSVEISGVEDRFNASLGTYHDLLKIIKDKDFLDNEENEDILEDIVLTLTLFEDREMIEERLKTYAHLFDDKVMKQLKRRRYTGWGRLSRKLINGIRDKQSGKTILDFLKSDGFANRNFMQLIHDDSLTFKEDIQKAQVSGQGDSLHEHIANLAGSPAIKKGILQTVKVVDELVKVMGRHKPENIVIEMARENQTTQKGQKNSRERMKRIEEGIKELGSQILKEHPVENTQLQNEKLYLYYLQNGRDMYVDQELDINRLSDYDVDAIVPQSFLKDDSIDNKVLTRSDKNRGKSDNVPSEEVVKKMKNYWRQLLNAKLITQRKFDNLTKAERGGLSELDKAGFIKRQLVETRQITKHVAQILDSRMNTKYDENDKLIREVKVITLKSKLVSDFRKDFQFYKVREINNYHHAHDAYLNAVVGTALIKKYPKLESEFVYGDYKVYDVRKMIAKSEQEIGKATAKYFFYSNIMNFFKTEITLANGEIRKRPLIETNGETGEIVWDKGRDFATVRKVLSMPQVNIVKKTEVQTGGFSKESILPKRNSDKLIARKKDWDPKKYGGFVSPTVAYSVLVVAKVEKGKSKKLKSVKELLGITIMERSSFEKNPIDFLEAKGYKEVKKDLIIKLPKYSLFELENGRKRMLASARELQKGNELALPSKYVNFLYLASHYEKLKGSPEDNEQKQLFVEQHKHYLDEIIEQISEFSKRVILADANLDKVLSAYNKHRDKPIREQAENIIHLFTLTNLGAPAAFKYFDTTIDRKQYRSTKEVLDATLIHQSITGLYETRIDLSQLGGD

SEQ ID NO: 2297 - protein, 1367 aa, synthetic construct
DKKYSIGLDIGTNSVGWAVITDEYKVPSKKFKVLGNTDRHSIKKNLIGALLFDSGETAEATRLKRTARRRYTRRKNRICYLQEIFSNEMAKVDDSFFHRLEESFLVEEDKKHERHPIFGNIVDEVAYHEKYPTIYHLRKKLVDSTDKADLRLIYLALAHMIKFRGHFLIEGDLNPDNSDVDKLFIQLVQTYNQLFEENPINASGVDAKAILSARLSKSRRLENLIAQLPGEKKNGLFGNLIALSLGLTPNFKSNFDLAEDAKLQLSKDTYDDDLDNLLAQIGDQYADLFLAAKNLSDAILLSDILRVNTEITKAPLSASMIKRYDEHHQDLTLLKALVRQQLPEKYKEIFFDQSKNGYAGYIDGGASQEEFYKFIKPILEKMDGTEELLVKLNREDLLRKQRTFDNGSIPHQIHLGELHAILRRQEDFYPFLKDNREKIEKILTFRIPYYVGPLARGNSRFAWMTRKSEETITPWNFEEVVDKGASAQSFIERMTNFDKNLPNEKVLPKHSLLYEYFTVYNELTKVKYVTEGMRKPAFLSGEQKKAIVDLLFKTNRKVTVKQLKEDYFKKIECFDSVEISGVEDRFNASLGTYHDLLKIIKDKDFLDNEENEDILEDIVLTLTLFEDREMIEERLKTYAHLFDDKVMKQLKRRRYTGWGRLSRKLINGIRDKQSGKTILDFLKSDGFANRNFMQLIHDDSLTFKEDIQKAQVSGQGDSLHEHIANLAGSPAIKKGILQTVKVVDELVKVMGRHKPENIVIEMARENQTTQKGQKNSRERMKRIEEGIKELGSQILKEHPVENTQLQNEKLYLYYLQNGRDMYVDQELDINRLSDYDVDAIVPQSFLKDDSIDNKVLTRSDKNRGKSDNVPSEEVVKKMKNYWRQLLNAKLITQRKFDNLTKAERGGLSELDKAGFIKRQLVETRQITKHVAQILDSRMNTKYDENDKLIREVKVITLKSKLVSDFRKDFQFYKVREINNYHHAHDAYLNAVVGTALIKKYPKLESEFVYGDYKVYDVRKMIAKSEQEIGKATAKYFFYSNIMNFFKTEITLANGEIRKRPLIETNGETGEIVWDKGRDFATVRKVLSMPQVNIVKKTEVQTGGFSKESILPKRNSDKLIARKKDWDPKKYGGFVSPTVAYSVLVVAKVEKGKSKKLKSVKELLGITIMERSSFEKNPIDFLEAKGYKEVKKDLIIKLPKYSLFELENGRKRMLASARELQKGNELALPSKYVNFLYLASHYEKLKGSPEDNEQKQLFVEQHKHYLDEIIEQISEFSKRVILADANLDKVLSAYNKHRDKPIREQAENIIHLFTLTNLGAPAAFKYFDTTIDRKQYRSTKEVLDATLIHQSITGLYETRIDLSQLGGD

SEQ ID NO: 2298 - protein, 1368 aa, synthetic construct
MDKKYSIGLDIGTNSVGWAVITDEYKVPSKKFKVLGNTDRHSIKKNLIGALLFDSGETAERTRLKRTARRRYTRRKNRICYLQEIFSNEMAKVDDSFFHRLEESFLVEEDKKHERHPIFGNIVDEVAYHEKYPTIYHLRKKLVDSTDKADLRLIYLALAHMIKFRGHFLIEGDLNPDNSDVDKLFIQLVQTYNQLFEENPINASGVDAKAILSARLSKSRRLENLIAQLPGEKKNGLFGNLIALSLGLTPNFKSNFDLAEDAKLQLSKDTYDDDLDNLLAQIGDQYADLFLAAKNLSDAILLSDILRVNTEITKAPLSASMIKRYDEHHQDLTLLKALVRQQLPEKYKEIFFDQSKNGYAGYIDGGASQEEFYKFIKPILEKMDGTEELLVKLNREDLLRKQRTFDNGSIPHQIHLGELHAILRRQEDFYPFLKDNREKIEKILTFRIPYYVGPLARGNSRFAWMTRKSEETITPWNFEEVVDKGASAQSFIERMTNFDKNLPNEKVLPKHSLLYEYFTVYNELTKVKYVTEGMRKPAFLSGEQKKAIVDLLFKTNRKVTVKQLKEDYFKKIECFDSVEISGVEDRFNASLGTYHDLLKIIKDKDFLDNEENEDILEDIVLTLTLFEDREMIEERLKTYAHLFDDKVMKQLKRRRYTGWGRLSRKLINGIRDKQSGKTILDFLKSDGFANRNFMQLIHDDSLTFKEDIQKAQVSGQGDSLHEHIANLAGSPAIKKGILQTVKVVDELVKVMGRHKPENIVIEMARENQTTQKGQKNSRERMKRIEEGIKELGSQILKEHPVENTQLQNEKLYLYYLQNGRDMYVDQELDINRLSDYDVDHIVPQSFLKDDSIDNKVLTRSDKNRGKSDNVPSEEVVKKMKNYWRQLLNAKLITQRKFDNLTKAERGGLSELDKAGFIKRQLVETRQITKHVAQILDSRMNTKYDENDKLIREVKVITLKSKLVSDFRKDFQFYKVREINNYHHAHDAYLNAVVGTALIKKYPKLESEFVYGDYKVYDVRKMIAKSEQEIGKATAKYFFYSNIMNFFKTEITLANGEIRKRPLIETNGETGEIVWDKGRDFATVRKVLSMPQVNIVKKTEVQTGGFSKESIRPKRNSDKLIARKKDWDPKKYGGFLWPTVAYSVLVVAKVEKGKSKKLKSVKELLGITIMERSSFEKNPIDFLEAKGYKEVKKDLIIKLPKYSLFELENGRKRMLASAKQLQKGNELALPSKYVNFLYLASHYEKLKGSPEDNEQKQLFVEQHKHYLDEIIEQISEFSKRVILADANLDKVLSAYNKHRDKPIREQAENIIHLFTLTRLGAPRAFKYFDTTIDPKQYRSTKEVLDATLIHQSITGLYETRIDLSQLGGD

SEQ ID NO: 2299 - protein, 1368 aa, synthetic construct
MDKKYSIGLDIGTNSVGWAVITDEYKVPSKKFKVLGNTDRHSIKKNLIGALLFDSGETAERTRLKRTARRRYTRRKNRICYLQEIFSNEMAKVDDSFFHRLEESFLVEEDKKHERHPIFGNIVDEVAYHEKYPTIYHLRKKLVDSTDKADLRLIYLALAHMIKFRGHFLIEGDLNPDNSDVDKLFIQLVQTYNQLFEENPINASGVDAKAILSARLSKSRRLENLIAQLPGEKKNGLFGNLIALSLGLTPNFKSNFDLAEDAKLQLSKDTYDDDLDNLLAQIGDQYADLFLAAKNLSDAILLSDILRVNTEITKAPLSASMIKRYDEHHQDLTLLKALVRQQLPEKYKEIFFDQSKNGYAGYIDGGASQEEFYKFIKPILEKMDGTEELLVKLNREDLLRKQRTFDNGSIPHQIHLGELHAILRRQEDFYPFLKDNREKIEKILTFRIPYYVGPLARGNSRFAWMTRKSEETITPWNFEEVVDKGASAQSFIERMTNFDKNLPNEKVLPKHSLLYEYFTVYNELTKVKYVTEGMRKPAFLSGEQKKAIVDLLFKTNRKVTVKQLKEDYFKKIECFDSVEISGVEDRFNASLGTYHDLLKIIKDKDFLDNEENEDILEDIVLTLTLFEDREMIEERLKTYAHLFDDKVMKQLKRRRYTGWGRLSRKLINGIRDKQSGKTILDFLKSDGFANRNFMQLIHDDSLTFKEDIQKAQVSGQGDSLHEHIANLAGSPAIKKGILQTVKVVDELVKVMGRHKPENIVIEMARENQTTQKGQKNSRERMKRIEEGIKELGSQILKEHPVENTQLQNEKLYLYYLQNGRDMYVDQELDINRLSDYDVDAIVPQSFLKDDSIDNKVLTRSDKNRGKSDNVPSEEVVKKMKNYWRQLLNAKLITQRKFDNLTKAERGGLSELDKAGFIKRQLVETRQITKHVAQILDSRMNTKYDENDKLIREVKVITLKSKLVSDFRKDFQFYKVREINNYHHAHDAYLNAVVGTALIKKYPKLESEFVYGDYKVYDVRKMIAKSEQEIGKATAKYFFYSNIMNFFKTEITLANGEIRKRPLIETNGETGEIVWDKGRDFATVRKVLSMPQVNIVKKTEVQTGGFSKESIRPKRNSDKLIARKKDWDPKKYGGFLWPTVAYSVLVVAKVEKGKSKKLKSVKELLGITIMERSSFEKNPIDFLEAKGYKEVKKDLIIKLPKYSLFELENGRKRMLASAKQLQKGNELALPSKYVNFLYLASHYEKLKGSPEDNEQKQLFVEQHKHYLDEIIEQISEFSKRVILADANLDKVLSAYNKHRDKPIREQAENIIHLFTLTRLGAPRAFKYFDTTIDPKQYRSTKEVLDATLIHQSITGLYETRIDLSQLGGD

SEQ ID NO: 2300 - protein, 1367 aa, synthetic construct
DKKYSIGLDIGTNSVGWAVITDEYKVPSKKFKVLGNTDRHSIKKNLIGALLFDSGETAERTRLKRTARRRYTRRKNRICYLQEIFSNEMAKVDDSFFHRLEESFLVEEDKKHERHPIFGNIVDEVAYHEKYPTIYHLRKKLVDSTDKADLRLIYLALAHMIKFRGHFLIEGDLNPDNSDVDKLFIQLVQTYNQLFEENPINASGVDAKAILSARLSKSRRLENLIAQLPGEKKNGLFGNLIALSLGLTPNFKSNFDLAEDAKLQLSKDTYDDDLDNLLAQIGDQYADLFLAAKNLSDAILLSDILRVNTEITKAPLSASMIKRYDEHHQDLTLLKALVRQQLPEKYKEIFFDQSKNGYAGYIDGGASQEEFYKFIKPILEKMDGTEELLVKLNREDLLRKQRTFDNGSIPHQIHLGELHAILRRQEDFYPFLKDNREKIEKILTFRIPYYVGPLARGNSRFAWMTRKSEETITPWNFEEVVDKGASAQSFIERMTNFDKNLPNEKVLPKHSLLYEYFTVYNELTKVKYVTEGMRKPAFLSGEQKKAIVDLLFKTNRKVTVKQLKEDYFKKIECFDSVEISGVEDRFNASLGTYHDLLKIIKDKDFLDNEENEDILEDIVLTLTLFEDREMIEERLKTYAHLFDDKVMKQLKRRRYTGWGRLSRKLINGIRDKQSGKTILDFLKSDGFANRNFMQLIHDDSLTFKEDIQKAQVSGQGDSLHEHIANLAGSPAIKKGILQTVKVVDELVKVMGRHKPENIVIEMARENQTTQKGQKNSRERMKRIEEGIKELGSQILKEHPVENTQLQNEKLYLYYLQNGRDMYVDQELDINRLSDYDVDAIVPQSFLKDDSIDNKVLTRSDKNRGKSDNVPSEEVVKKMKNYWRQLLNAKLITQRKFDNLTKAERGGLSELDKAGFIKRQLVETRQITKHVAQILDSRMNTKYDENDKLIREVKVITLKSKLVSDFRKDFQFYKVREINNYHHAHDAYLNAVVGTALIKKYPKLESEFVYGDYKVYDVRKMIAKSEQEIGKATAKYFFYSNIMNFFKTEITLANGEIRKRPLIETNGETGEIVWDKGRDFATVRKVLSMPQVNIVKKTEVQTGGFSKESIRPKRNSDKLIARKKDWDPKKYGGFLWPTVAYSVLVVAKVEKGKSKKLKSVKELLGITIMERSSFEKNPIDFLEAKGYKEVKKDLIIKLPKYSLFELENGRKRMLASAKQLQKGNELALPSKYVNFLYLASHYEKLKGSPEDNEQKQLFVEQHKHYLDEIIEQISEFSKRVILADANLDKVLSAYNKHRDKPIREQAENIIHLFTLTRLGAPRAFKYFDTTIDPKQYRSTKEVLDATLIHQSITGLYETRIDLSQLGGD

SEQ ID NO: 2301 - protein, 1057 aa, synthetic construct
MNQKFILGLDIGITSVGYGLIDYETKNIIDAGVRLFPEANVENNEGRRSKRGSRRLKRRRIHRLERVKLLLTEYDLINKEQIPTSNNPYQIRVKGLSEILSKDELAIALLHLAKRRGIHNVDVAADKEETASDSLSTKDQINKNAKFLESRYVCELQKERLENEGHVRGVENRFLTKDIVREAKKIIDTQMQYYPEIDETFKEKYISLVETRREYFEGPGQGSPFGWNGDLKKWYEMLMGHCTYFPQELRSVKYAYSADLFNALNDLNNLIIQRDNSEKLEYHEKYHIIENVFKQKKKPTLKQIAKEIGVNPEDIKGYRITKSGTPEFTSFKLFHDLKKVVKDHAILDDIDLLNQIAEILTIYQDKDSIVAELGQLEYLMSEADKQSISELTGYTGTHSLSLKCMNMIIDELWHSSMNQMEVFTYLNMRPKKYELKGYQRIPTDMIDDAILSPVVKRTFIQSINVINKVIEKYGIPEDIIIELARENNSDDRKKFINNLQKKNEATRKRINEIIGQTGNQNAKRIVEKIRLHDQQEGKCLYSLESIPLEDLLNNPNHYEVDHIIPRSVSFDNSYHNKVLVKQSENSKKSNLTPYQYFNSGKSKLSYNQFKQHILNLSKSQDRISKKKKEYLLEERDINKFEVQKEFINRNLVDTRYATRELTNYLKAYFSANNMNVKVKTINGSFTDYLRKVWKFKKERNHGYKHHAEDALIIANADFLFKENKKLKAVNSVLEKPEIETKQLDIQVDSEDNYSEMFIIPKQVQDIKDFRNFKYSHRVDKKPNRQLINDTLYSTRKKDNSTYIVQTIKDIYAKDNTTLKKQFDKSPEKFLMYQHDPRTFEKLEVIMKQYANEKNPLAKYHEETGEYLTKYSKKNNGPIVKSLKYIGNKLGSHLDVTHQFKSSTKKLVKLSIKNYRFDVYLTEKGYKFVTIAYLNVFKKDNYYYIPKDKYQELKEKKKIKDTDQFIASFYKNDLIKLNGDLYKIIGVNSDDRNIIELDYYDIKYKDYCEINNIKGEPRIKKTIGKKTESIEKFTTDVLGNLYLHSTEKAPQLIFKRGL

SEQ ID NO: 2302 - protein, 1057 aa, synthetic construct
MNQKFILGLDIGITSVGYGLIDYETKNIIDAGVRLFPEANVENNEGRRSKRGSRRLKRRRIHRLERVKLLLTEYDLINKEQIPTSNNPYQIRVKGLSEILSKDELAIALLHLAKRRGIHNVDVAADKEETASDSLSTKDQINKNAKFLESRYVCELQKERLENEGHVRGVENRFLTKDIVREAKKIIDTQMQYYPEIDETFKEKYISLVETRREYFEGPGQGSPFGWNGDLKKWYEMLMGHCTYFPQELRSVKYAYSADLFNALNDLNNLIIQRDNSEKLEYHEKYHIIENVFKQKKKPTLKQIAKEIGVNPEDIKGYRITKSGTPEFTSFKLFHDLKKVVKDHAILDDIDLLNQIAEILTIYQDKDSIVAELGQLEYLMSEADKQSISELTGYTGTHSLSLKCMNMIIDELWHSSMNQMEVFTYLNMRPKKYELKGYQRIPTDMIDDAILSPVVKRTFIQSINVINKVIEKYGIPEDIIIELARENNSDDRKKFINNLQKKNEATRKRINEIIGQTGNQNAKRIVEKIRLHDQQEGKCLYSLESIPLEDLLNNPNHYEVDHIIPRSVSFDNSYHNKVLVKQSEASKKSNLTPYQYFNSGKSKLSYNQFKQHILNLSKSQDRISKKKKEYLLEERDINKFEVQKEFINRNLVDTRYATRELTNYLKAYFSANNMNVKVKTINGSFTDYLRKVWKFKKERNHGYKHHAEDALIIANADFLFKENKKLKAVNSVLEKPEIETKQLDIQVDSEDNYSEMFIIPKQVQDIKDFRNFKYSHRVDKKPNRQLINDTLYSTRKKDNSTYIVQTIKDIYAKDNTTLKKQFDKSPEKFLMYQHDPRTFEKLEVIMKQYANEKNPLAKYHEETGEYLTKYSKKNNGPIVKSLKYIGNKLGSHLDVTHQFKSSTKKLVKLSIKNYRFDVYLTEKGYKFVTIAYLNVFKKDNYYYIPKDKYQELKEKKKIKDTDQFIASFYKNDLIKLNGDLYKIIGVNSDDRNIIELDYYDIKYKDYCEINNIKGEPRIKKTIGKKTESIEKFTTDVLGNLYLHSTEKAPQLIFKRGL

SEQ ID NO: 2303 - protein, 1056 aa, synthetic construct
NQKFILGLDIGITSVGYGLIDYETKNIIDAGVRLFPEANVENNEGRRSKRGSRRLKRRRIHRLERVKLLLTEYDLINKEQIPTSNNPYQIRVKGLSEILSKDELAIALLHLAKRRGIHNVDVAADKEETASDSLSTKDQINKNAKFLESRYVCELQKERLENEGHVRGVENRFLTKDIVREAKKIIDTQMQYYPEIDETFKEKYISLVETRREYFEGPGQGSPFGWNGDLKKWYEMLMGHCTYFPQELRSVKYAYSADLFNALNDLNNLIIQRDNSEKLEYHEKYHIIENVFKQKKKPTLKQIAKEIGVNPEDIKGYRITKSGTPEFTSFKLFHDLKKVVKDHAILDDIDLLNQIAEILTIYQDKDSIVAELGQLEYLMSEADKQSISELTGYTGTHSLSLKCMNMIIDELWHSSMNQMEVFTYLNMRPKKYELKGYQRIPTDMIDDAILSPVVKRTFIQSINVINKVIEKYGIPEDIIIELARENNSDDRKKFINNLQKKNEATRKRINEIIGQTGNQNAKRIVEKIRLHDQQEGKCLYSLESIPLEDLLNNPNHYEVDHIIPRSVSFDNSYHNKVLVKQSEASKKSNLTPYQYFNSGKSKLSYNQFKQHILNLSKSQDRISKKKKEYLLEERDINKFEVQKEFINRNLVDTRYATRELTNYLKAYFSANNMNVKVKTINGSFTDYLRKVWKFKKERNHGYKHHAEDALIIANADFLFKENKKLKAVNSVLEKPEIETKQLDIQVDSEDNYSEMFIIPKQVQDIKDFRNFKYSHRVDKKPNRQLINDTLYSTRKKDNSTYIVQTIKDIYAKDNTTLKKQFDKSPEKFLMYQHDPRTFEKLEVIMKQYANEKNPLAKYHEETGEYLTKYSKKNNGPIVKSLKYIGNKLGSHLDVTHQFKSSTKKLVKLSIKNYRFDVYLTEKGYKFVTIAYLNVFKKDNYYYIPKDKYQELKEKKKIKDTDQFIASFYKNDLIKLNGDLYKIIGVNSDDRNIIELDYYDIKYKDYCEINNIKGEPRIKKTIGKKTESIEKFTTDVLGNLYLHSTEKAPQLIFKRGL

SEQ ID NO: 2304 - protein, 1057 aa, synthetic construct
MNQKFILGLDIGITSVGYGLIDYETKNIIDAGVRLFPEANVENNEGRRSKRGSRRLKRRRIHRLERVKLLLTEYDLINKEQIPTSNNPYQIRVKGLSEILSKDELAIALLHLAKRRGIHNVDVAADKEETASDSLSTKDQINKNAKFLESRYVCELQKERLENEGHVRGVENRFLTKDIVREAKKIIDTQMQYYPEIDETFKEKYISLVETRREYFEGPGQGSPFGWNGDLKKWYEMLMGHCTYFPQELRSVKYAYSADLFNALNDLNNLIIQRDNSEKLEYHEKYHIIENVFKQKKKPTLKQIAKEIGVNPEDIKGYRITKSGTPEFTSFKLFHDLKKVVKDHAILDDIDLLNQIAEILTIYQDKDSIVAELGQLEYLMSEADKQSISELTGYTGTHSLSLKCMNMIIDELWHSSMNQMEVFTYLNMRPKKYELKGYQRIPTDMIDDAILSPVVKRTFIQSINVINKVIEKYGIPEDIIIELARENNSDDRKKFINNLQKKNEATRKRINEIIGQTGNQNAKRIVEKIRLHDQQEGKCLYSLESIPLEDLLNNPNHYEVDHIIPRSVSFDNSYHNKVLVKQSENSKKSNLTPYQYFNSGKSKLSYNQFKQHILNLSKSQDRISKKKKEYLLEERDINKFEVQKEFINRNLVDTRYATRELTSYLKAYFSANNMDVKVKTINGSFTNHLRKVWRFDKYRNHGYKHHAEDALIIANADFLFKENKKLQNTNKILEKPTIENNTKKVTVEKEEDYNNVFETPKLVEDIKQYRDYKFSHRVDKKPNRQLINDTLYSTRMKDEHDYIVQTITDIYGKDNTNLKKQFNKNPEKFLMYQNDPKTFEKLSIIMKQYSDEKNPLAKYYEETGEYLTKYSKKNNGPIVKKIKLLGNKVGNHLDVTNKYENSTKKLVKLSIKNYRFDVYLTEKGYKFVTIAYLNVFKKDNYYYIPKDKYQELKEKKKIKDTDQFIASFYKNDLIKLNGDLYKIIGVNSDDRNIIELDYYDIKYKDYCEINNIKGEPRIKKTIGKKTESIEKFTTDVLGNLYLHSTEKAPQLIFKRGL

SEQ ID NO: 2305 - protein, 1057 aa, synthetic construct
MNQKFILGLDIGITSVGYGLIDYETKNIIDAGVRLFPEANVENNEGRRSKRGSRRLKRRRIHRLERVKLLLTEYDLINKEQIPTSNNPYQIRVKGLSEILSKDELAIALLHLAKRRGIHNVDVAADKEETASDSLSTKDQINKNAKFLESRYVCELQKERLENEGHVRGVENRFLTKDIVREAKKIIDTQMQYYPEIDETFKEKYISLVETRREYFEGPGQGSPFGWNGDLKKWYEMLMGHCTYFPQELRSVKYAYSADLFNALNDLNNLIIQRDNSEKLEYHEKYHIIENVFKQKKKPTLKQIAKEIGVNPEDIKGYRITKSGTPEFTSFKLFHDLKKVVKDHAILDDIDLLNQIAEILTIYQDKDSIVAELGQLEYLMSEADKQSISELTGYTGTHSLSLKCMNMIIDELWHSSMNQMEVFTYLNMRPKKYELKGYQRIPTDMIDDAILSPVVKRTFIQSINVINKVIEKYGIPEDIIIELARENNSDDRKKFINNLQKKNEATRKRINEIIGQTGNQNAKRIVEKIRLHDQQEGKCLYSLESIPLEDLLNNPNHYEVDHIIPRSVSFDNSYHNKVLVKQSEASKKSNLTPYQYFNSGKSKLSYNQFKQHILNLSKSQDRISKKKKEYLLEERDINKFEVQKEFINRNLVDTRYATRELTSYLKAYFSANNMDVKVKTINGSFTNHLRKVWRFDKYRNHGYKHHAEDALIIANADFLFKENKKLQNTNKILEKPTIENNTKKVTVEKEEDYNNVFETPKLVEDIKQYRDYKFSHRVDKKPNRQLINDTLYSTRMKDEHDYIVQTITDIYGKDNTNLKKQFNKNPEKFLMYQNDPKTFEKLSIIMKQYSDEKNPLAKYYEETGEYLTKYSKKNNGPIVKKIKLLGNKVGNHLDVTNKYENSTKKLVKLSIKNYRFDVYLTEKGYKFVTIAYLNVFKKDNYYYIPKDKYQELKEKKKIKDTDQFIASFYKNDLIKLNGDLYKIIGVNSDDRNIIELDYYDIKYKDYCEINNIKGEPRIKKTIGKKTESIEKFTTDVLGNLYLHSTEKAPQLIFKRGL

SEQ ID NO: 2306 - protein, 1056 aa, synthetic construct
NQKFILGLDIGITSVGYGLIDYETKNIIDAGVRLFPEANVENNEGRRSKRGSRRLKRRRIHRLERVKLLLTEYDLINKEQIPTSNNPYQIRVKGLSEILSKDELAIALLHLAKRRGIHNVDVAADKEETASDSLSTKDQINKNAKFLESRYVCELQKERLENEGHVRGVENRFLTKDIVREAKKIIDTQMQYYPEIDETFKEKYISLVETRREYFEGPGQGSPFGWNGDLKKWYEMLMGHCTYFPQELRSVKYAYSADLFNALNDLNNLIIQRDNSEKLEYHEKYHIIENVFKQKKKPTLKQIAKEIGVNPEDIKGYRITKSGTPEFTSFKLFHDLKKVVKDHAILDDIDLLNQIAEILTIYQDKDSIVAELGQLEYLMSEADKQSISELTGYTGTHSLSLKCMNMIIDELWHSSMNQMEVFTYLNMRPKKYELKGYQRIPTDMIDDAILSPVVKRTFIQSINVINKVIEKYGIPEDIIIELARENNSDDRKKFINNLQKKNEATRKRINEIIGQTGNQNAKRIVEKIRLHDQQEGKCLYSLESIPLEDLLNNPNHYEVDHIIPRSVSFDNSYHNKVLVKQSEASKKSNLTPYQYFNSGKSKLSYNQFKQHILNLSKSQDRISKKKKEYLLEERDINKFEVQKEFINRNLVDTRYATRELTSYLKAYFSANNMDVKVKTINGSFTNHLRKVWRFDKYRNHGYKHHAEDALIIANADFLFKENKKLQNTNKILEKPTIENNTKKVTVEKEEDYNNVFETPKLVEDIKQYRDYKFSHRVDKKPNRQLINDTLYSTRMKDEHDYIVQTITDIYGKDNTNLKKQFNKNPEKFLMYQNDPKTFEKLSIIMKQYSDEKNPLAKYYEETGEYLTKYSKKNNGPIVKKIKLLGNKVGNHLDVTNKYENSTKKLVKLSIKNYRFDVYLTEKGYKFVTIAYLNVFKKDNYYYIPKDKYQELKEKKKIKDTDQFIASFYKNDLIKLNGDLYKIIGVNSDDRNIIELDYYDIKYKDYCEINNIKGEPRIKKTIGKKTESIEKFTTDVLGNLYLHSTEKAPQLIFKRGL

SEQ ID NO: 2307 - protein, 1368 aa, synthetic construct
MDKKYSIGLDIGTNSVGWAVITDEYKVPSKKFKVLGNTDRHSIKKNLIGALLFDSGETAEATRLKRTARRRYTRRKNRICYLQEIFSNEMAKVDDSFFHRLEESFLVEEDKKHERHPIFGNIVDEVAYHEKYPTIYHLRKKLVDSTDKADLRLIYLALAHMIKFRGHFLIEGDLNPDNSDVDKLFIQLVQTYNQLFEENPINASGVDAKAILSARLSKSRRLENLIAQLPGEKKNGLFGNLIALSLGLTPNFKSNFDLAEDAKLQLSKDTYDDDLDNLLAQIGDQYADLFLAAKNLSDAILLSDILRVNTEITKAPLSASMIKRYDEHHQDLTLLKALVRQQLPEKYKEIFFDQSKNGYAGYIDGGASQEEFYKFIKPILEKMDGTEELLVKLNREDLLRKQRTFDNGSIPHQIHLGELHAILRRQEDFYPFLKDNREKIEKILTFRIPYYVGPLARGNSRFAWMTRKSEETITPWNFEEVVDKGASAQSFIERMTNFDKNLPNEKVLPKHSLLYEYFTVYNELTKVKYVTEGMRKPAFLSGEQKKAIVDLLFKTNRKVTVKQLKEDYFKKIECFDSVEISGVEDRFNASLGTYHDLLKIIKDKDFLDNEENEDILEDIVLTLTLFEDREMIEERLKTYAHLFDDKVMKQLKRRRYTGWGRLSRKLINGIRDKQSGKTILDFLKSDGFANRNFMQLIHDDSLTFKEDIQKAQVSGQGDSLHEHIANLAGSPAIKKGILQTVKVVDELVKVMGRHKPENIVIEMARENQTTQKGQKNSRERMKRIEEGIKELGSQILKEHPVENTQLQNEKLYLYYLQNGRDMYVDQELDINRLSDYDVDHIVPQSFLKDDSIDNKVLTRSDKNRGKSDNVPSEEVVKKMKNYWRQLLNAKLITQRKFDNLTKAERGGLSELDKAGFIKRQLVETRQITKHVAQILDSRMNTKYDENDKLIREVKVITLKSKLVSDFRKDFQFYKVREINNYHHAHDAYLNAVVGTALIKKYPKLESEFVYGDYKVYDVRKMIAKSEQEIGKATAKYFFYSNIMNFFKTEITLANGEIRKRPLIETNGETGEIVWDKGRDFATVRKVLSMPQVNIVKKTEVQTGGFSKESILPKRNSDKLIARKKDWDPKKYGGFLWPTVAYSVLVVAKVEKGKSKKLKSVKELLGITIMERSSFEKNPIDFLEAKGYKEVKKDLIIKLPKYSLFELENGRKRMLASAKQLQKGNELALPSKYVNFLYLASHYEKLKGSPEDNEQKQLFVEQHKHYLDEIIEQISEFSKRVILADANLDKVLSAYNKHRDKPIREQAENIIHLFTLTNLGAPAAFKYFDTTIDRKQYRSTKEVLDATLIHQSITGLYETRIDLSQLGGD

SEQ ID NO: 2308 - protein, 1368 aa, synthetic construct
MDKKYSIGLDIGTNSVGWAVITDEYKVPSKKFKVLGNTDRHSIKKNLIGALLFDSGETAEATRLKRTARRRYTRRKNRICYLQEIFSNEMAKVDDSFFHRLEESFLVEEDKKHERHPIFGNIVDEVAYHEKYPTIYHLRKKLVDSTDKADLRLIYLALAHMIKFRGHFLIEGDLNPDNSDVDKLFIQLVQTYNQLFEENPINASGVDAKAILSARLSKSRRLENLIAQLPGEKKNGLFGNLIALSLGLTPNFKSNFDLAEDAKLQLSKDTYDDDLDNLLAQIGDQYADLFLAAKNLSDAILLSDILRVNTEITKAPLSASMIKRYDEHHQDLTLLKALVRQQLPEKYKEIFFDQSKNGYAGYIDGGASQEEFYKFIKPILEKMDGTEELLVKLNREDLLRKQRTFDNGSIPHQIHLGELHAILRRQEDFYPFLKDNREKIEKILTFRIPYYVGPLARGNSRFAWMTRKSEETITPWNFEEVVDKGASAQSFIERMTNFDKNLPNEKVLPKHSLLYEYFTVYNELTKVKYVTEGMRKPAFLSGEQKKAIVDLLFKTNRKVTVKQLKEDYFKKIECFDSVEISGVEDRFNASLGTYHDLLKIIKDKDFLDNEENEDILEDIVLTLTLFEDREMIEERLKTYAHLFDDKVMKQLKRRRYTGWGRLSRKLINGIRDKQSGKTILDFLKSDGFANRNFMQLIHDDSLTFKEDIQKAQVSGQGDSLHEHIANLAGSPAIKKGILQTVKVVDELVKVMGRHKPENIVIEMARENQTTQKGQKNSRERMKRIEEGIKELGSQILKEHPVENTQLQNEKLYLYYLQNGRDMYVDQELDINRLSDYDVDAIVPQSFLKDDSIDNKVLTRSDKNRGKSDNVPSEEVVKKMKNYWRQLLNAKLITQRKFDNLTKAERGGLSELDKAGFIKRQLVETRQITKHVAQILDSRMNTKYDENDKLIREVKVITLKSKLVSDFRKDFQFYKVREINNYHHAHDAYLNAVVGTALIKKYPKLESEFVYGDYKVYDVRKMIAKSEQEIGKATAKYFFYSNIMNFFKTEITLANGEIRKRPLIETNGETGEIVWDKGRDFATVRKVLSMPQVNIVKKTEVQTGGFSKESILPKRNSDKLIARKKDWDPKKYGGFLWPTVAYSVLVVAKVEKGKSKKLKSVKELLGITIMERSSFEKNPIDFLEAKGYKEVKKDLIIKLPKYSLFELENGRKRMLASAKQLQKGNELALPSKYVNFLYLASHYEKLKGSPEDNEQKQLFVEQHKHYLDEIIEQISEFSKRVILADANLDKVLSAYNKHRDKPIREQAENIIHLFTLTNLGAPAAFKYFDTTIDRKQYRSTKEVLDATLIHQSITGLYETRIDLSQLGGD

SEQ ID NO: 2309 - protein, 1367 aa, synthetic construct
DKKYSIGLDIGTNSVGWAVITDEYKVPSKKFKVLGNTDRHSIKKNLIGALLFDSGETAEATRLKRTARRRYTRRKNRICYLQEIFSNEMAKVDDSFFHRLEESFLVEEDKKHERHPIFGNIVDEVAYHEKYPTIYHLRKKLVDSTDKADLRLIYLALAHMIKFRGHFLIEGDLNPDNSDVDKLFIQLVQTYNQLFEENPINASGVDAKAILSARLSKSRRLENLIAQLPGEKKNGLFGNLIALSLGLTPNFKSNFDLAEDAKLQLSKDTYDDDLDNLLAQIGDQYADLFLAAKNLSDAILLSDILRVNTEITKAPLSASMIKRYDEHHQDLTLLKALVRQQLPEKYKEIFFDQSKNGYAGYIDGGASQEEFYKFIKPILEKMDGTEELLVKLNREDLLRKQRTFDNGSIPHQIHLGELHAILRRQEDFYPFLKDNREKIEKILTFRIPYYVGPLARGNSRFAWMTRKSEETITPWNFEEVVDKGASAQSFIERMTNFDKNLPNEKVLPKHSLLYEYFTVYNELTKVKYVTEGMRKPAFLSGEQKKAIVDLLFKTNRKVTVKQLKEDYFKKIECFDSVEISGVEDRFNASLGTYHDLLKIIKDKDFLDNEENEDILEDIVLTLTLFEDREMIEERLKTYAHLFDDKVMKQLKRRRYTGWGRLSRKLINGIRDKQSGKTILDFLKSDGFANRNFMQLIHDDSLTFKEDIQKAQVSGQGDSLHEHIANLAGSPAIKKGILQTVKVVDELVKVMGRHKPENIVIEMARENQTTQKGQKNSRERMKRIEEGIKELGSQILKEHPVENTQLQNEKLYLYYLQNGRDMYVDQELDINRLSDYDVDAIVPQSFLKDDSIDNKVLTRSDKNRGKSDNVPSEEVVKKMKNYWRQLLNAKLITQRKFDNLTKAERGGLSELDKAGFIKRQLVETRQITKHVAQILDSRMNTKYDENDKLIREVKVITLKSKLVSDFRKDFQFYKVREINNYHHAHDAYLNAVVGTALIKKYPKLESEFVYGDYKVYDVRKMIAKSEQEIGKATAKYFFYSNIMNFFKTEITLANGEIRKRPLIETNGETGEIVWDKGRDFATVRKVLSMPQVNIVKKTEVQTGGFSKESILPKRNSDKLIARKKDWDPKKYGGFLWPTVAYSVLVVAKVEKGKSKKLKSVKELLGITIMERSSFEKNPIDFLEAKGYKEVKKDLIIKLPKYSLFELENGRKRMLASAKQLQKGNELALPSKYVNFLYLASHYEKLKGSPEDNEQKQLFVEQHKHYLDEIIEQISEFSKRVILADANLDKVLSAYNKHRDKPIREQAENIIHLFTLTNLGAPAAFKYFDTTIDRKQYRSTKEVLDATLIHQSITGLYETRIDLSQLGGD

SEQ ID NO: 2310 - protein, 30 aa, synthetic construct
MDSLLMNRRKFLYQFKNVRWAKGRRETYLC

SEQ ID NO: 2311 - protein, 19 aa, synthetic construct
MKRTADGSEFESPKKKRKV

SEQ ID NO: 2312 - protein, 17 aa, synthetic construct
KRTADGSEFEPKKKRKV

SEQ ID NO: 2313 - protein, 19 aa, synthetic construct
NLSKRPAAIKKAGQAKKKK

SEQ ID NO: 2314 - protein, 11 aa, synthetic construct
RQRRNELKRSF

SEQ ID NO: 2315 - protein, 38 aa, synthetic construct
NQSSNFGPMKGGNFGGRSSGPYGGGGQYFAKPRNQGGY

SEQ ID NO: 2316 - protein, 7 aa, synthetic construct
PKKKRKV

SEQ ID NO: 2317 - protein, 16 aa, synthetic construct
  VARIANT 3..12: note = Any amino acid
KRXXXXXXXXXXKKKL

SEQ ID NO: 2318 - protein, 16 aa, synthetic construct
KRPAATKKAGQAKKKK

SEQ ID NO: 2319 - protein, 20 aa, synthetic construct
AVKRPAATKKAGQAKKKKLD

SEQ ID NO: 2320 - protein, 25 aa, synthetic construct
MSRRRKANPTKLSENAKKLAKEVEN

SEQ ID NO: 2321 - protein, 9 aa, synthetic construct
PAAKRVKLD

SEQ ID NO: 2322 - protein, 9 aa, synthetic construct
KLKIKRPVK

SEQ ID NO: 2323 - protein, 8 aa, synthetic construct
VSRKRPRP

SEQ ID NO: 2324 - protein, 10 aa, synthetic construct
EGAPPAKRAR

SEQ ID NO: 2325 - protein, 12 aa, synthetic construct
PPQPKKKPLDGE

SEQ ID NO: 2326 - protein, 21 aa, synthetic construct
SGGSKRTADGSEFEPKKKRKV

SEQ ID NO: 2327 - DNA, 33 bp, synthetic construct
  source 1..33: mol_type = other DNA
gccaacatgaggatcacccatgtctgcagggcc

SEQ ID NO: 2328 - protein, 131 aa, synthetic construct
GSASNFTQFVLVDNGGTGDVTVAPSNFANGVAEWISSNSRSQAYKVTCSVRQSSAQNRKYTIKVEVPKVATQTVGGEELPVAGWRSYLNMELTIPIFATNSDCELIVKAMQGLLKDGNPIPSAIAANSGIY

SEQ ID NO: 2329 - protein, 150 aa, synthetic construct
  SITE 1..150: note = This sequence may encompass 1-30 GGGGS repeats
GGGGSGGGGSGGGGSGGGGSGGGGSGGGGSGGGGSGGGGSGGGGSGGGGSGGGGSGGGGSGGGGSGGGGSGGGGSGGGGSGGGGSGGGGSGGGGSGGGGSGGGGSGGGGSGGGGSGGGGSGGGGSGGGGSGGGGSGGGGSGGGGSGGGGS

SEQ ID NO: 2330 - protein, 30 aa, synthetic construct
  SITE 1..30: note = This sequence may encompass 1-30 residues
GGGGGGGGGGGGGGGGGGGGGGGGGGGGGG

SEQ ID NO: 2331 - protein, 150 aa, synthetic construct
  SITE 1..150: note = This sequence may encompass 1-30 EAAAK repeats
EAAAKEAAAKEAAAKEAAAKEAAAKEAAAKEAAAKEAAAKEAAAKEAAAKEAAAKEAAAKEAAAKEAAAKEAAAKEAAAKEAAAKEAAAKEAAAKEAAAKEAAAKEAAAKEAAAKEAAAKEAAAKEAAAKEAAAKEAAAKEAAAKEAAAK

SEQ ID NO: 2332 - protein, 90 aa, synthetic construct
  SITE 1..90: note = This sequence may encompass 1-30 GGS repeats
GGSGGSGGSGGSGGSGGSGGSGGSGGSGGSGGSGGSGGSGGSGGSGGSGGSGGSGGSGGSGGSGGSGGSGGSGGSGGSGGSGGSGGSGGS

SEQ ID NO: 2333 - protein, 120 aa, synthetic construct
  SITE 1..120: note = This sequence may encompass 1-30 SGGS repeats
SGGSSGGSSGGSSGGSSGGSSGGSSGGSSGGSSGGSSGGSSGGSSGGSSGGSSGGSSGGSSGGSSGGSSGGSSGGSSGGSSGGSSGGSSGGSSGGSSGGSSGGSSGGSSGGSSGGSSGGS

SEQ ID NO: 2334 - protein, 60 aa, synthetic construct
  SITE 1..60: note = This sequence may encompass 1-30 XP repeats
XPXPXPXPXPXPXPXPXPXPXPXPXPXPXPXPXPXPXPXPXPXPXPXPXPXPXPXPXPXP

SEQ ID NO: 2335 - protein, 16 aa, synthetic construct
SGSETPGTSESATPES

SEQ ID NO: 2336 - protein, 32 aa, synthetic construct
SGGSSGGSSGSETPGTSESATPESSGGSSGGS

SEQ ID NO: 2337 - protein, 10 aa, synthetic construct
SGGSGGSGGS

SEQ ID NO: 2338 - protein, 4 aa, synthetic construct
SGGS

SEQ ID NO: 2339 - protein, 60 aa, synthetic construct
SGGSSGGSSGSETPGTSESATPESAGSYPYDVPDYAGSAAPAAKKKKLDGSGSGGSSGGS

SEQ ID NO: 2340 - protein, 33 aa, synthetic construct
SGGSSGGSSGSETPGTSESATPESSGGSSGGSS

SEQ ID NO: 2341 - protein, 22 aa, synthetic construct
SGGSKRTADGSEFESPKKKRKV

SEQ ID NO: 2342 - protein, 12 aa, synthetic construct
GSGPAAKRVKLD

SEQ ID NO: 2343 - protein, 2117 aa, synthetic construct
MKRTADGSEFESPKKKRKVDKKYSIGLDIGTNSVGWAVITDEYKVPSKKFKVLGNTDRHSIKKNLIGALLFDSGETAEATRLKRTARRRYTRRKNRICYLQEIFSNEMAKVDDSFFHRLEESFLVEEDKKHERHPIFGNIVDEVAYHEKYPTIYHLRKKLVDSTDKADLRLIYLALAHMIKFRGHFLIEGDLNPDNSDVDKLFIQLVQTYNQLFEENPINASGVDAKAILSARLSKSRRLENLIAQLPGEKKNGLFGNLIALSLGLTPNFKSNFDLAEDAKLQLSKDTYDDDLDNLLAQIGDQYADLFLAAKNLSDAILLSDILRVNTEITKAPLSASMIKRYDEHHQDLTLLKALVRQQLPEKYKEIFFDQSKNGYAGYIDGGASQEEFYKFIKPILEKMDGTEELLVKLNREDLLRKQRTFDNGSIPHQIHLGELHAILRRQEDFYPFLKDNREKIEKILTFRIPYYVGPLARGNSRFAWMTRKSEETITPWNFEEVVDKGASAQSFIERMTNFDKNLPNEKVLPKHSLLYEYFTVYNELTKVKYVTEGMRKPAFLSGEQKKAIVDLLFKTNRKVTVKQLKEDYFKKIECFDSVEISGVEDRFNASLGTYHDLLKIIKDKDFLDNEENEDILEDIVLTLTLFEDREMIEERLKTYAHLFDDKVMKQLKRRRYTGWGRLSRKLINGIRDKQSGKTILDFLKSDGFANRNFMQLIHDDSLTFKEDIQKAQVSGQGDSLHEHIANLAGSPAIKKGILQTVKVVDELVKVMGRHKPENIVIEMARENQTTQKGQKNSRERMKRIEEGIKELGSQILKEHPVENTQLQNEKLYLYYLQNGRDMYVDQELDINRLSDYDVDAIVPQSFLKDDSIDNKVLTRSDKNRGKSDNVPSEEVVKKMKNYWRQLLNAKLITQRKFDNLTKAERGGLSELDKAGFIKRQLVETRQITKHVAQILDSRMNTKYDENDKLIREVKVITLKSKLVSDFRKDFQFYKVREINNYHHAHDAYLNAVVGTALIKKYPKLESEFVYGDYKVYDVRKMIAKSEQEIGKATAKYFFYSNIMNFFKTEITLANGEIRKRPLIETNGETGEIVWDKGRDFATVRKVLSMPQVNIVKKTEVQTGGFSKESILPKRNSDKLIARKKDWDPKKYGGFDSPTVAYSVLVVAKVEKGKSKKLKSVKELLGITIMERSSFEKNPIDFLEAKGYKEVKKDLIIKLPKYSLFELENGRKRMLASAGELQKGNELALPSKYVNFLYLASHYEKLKGSPEDNEQKQLFVEQHKHYLDEIIEQISEFSKRVILADANLDKVLSAYNKHRDKPIREQAENIIHLFTLTNLGAPAAFKYFDTTIDRKRYTSTKEVLDATLIHQSITGLYETRIDLSQLGGDSGGSSGGSSGSETPGTSESATPESSGGSSGGSSTLNIEDEYRLHETSKEPDVSLGSTWLSDFPQAWAETGGMGLAVRQAPLIIPLKATSTPVSIKQYPMSQEARLGIKPHIQRLLDQGILVPCQSPWNTPLLPVKKPGTNDYRPVQDLREVNKRVEDIHPTVPNPYNLLSGLPPSHQWYTVLDLKDAFFCLRLHPTSQPLFAFEWRDPEMGISGQLTWTRLPQGFKNSPTLFNEALHRDLADFRIQHPDLILLQYVDDLLLAATSELDCQQGTRALLQTLGNLGYRASAKKAQICQKQVKYLGYLLKEGQRWLTEARKETVMGQPTPKTPRQLREFLGKAGFCRLFIPGFAEMAAPLYPLTKPGTLFNWGPDQQKAYQEIKQALLTAPALGLPDLTKPFELFVDEKQGYAKGVLTQKLGPWRRPVAYLSKKLDPVAAGWPPCLRMVAAIAVLTKDAGKLTMGQPLVILAPHAVEALVKQPPDRWLSNARMTHYQALLLDTDRVQFGPVVALNPATLLPLPEEGLQHNCLDILAEAHGTRPDLTDQPLPDADHTWYTDGSSLLQEGQRKAGAAVTTETEVIWAKALPAGTSAQRAELIALTQALKMAEGKKLNVYTDSRYAFATAHIHGEIYRRRGWLTSEGKEIKNKDEILALLKALFLPKRLSIIHCPGHQKGHSAEARGNRMADQAARKAAITETPDTSTLLIENSSPSGGSKRTADGSEFEPKKKRKV

SEQ ID NO: 2344 - protein, 2131 aa, synthetic construct
MKRTADGSEFESPKKKRKVDKKYSIGLDIGTNSVGWAVITDEYKVPSKKFKVLGNTDRHSIKKNLIGALLFDSGETAEATRLKRTARRRYTRRKNRICYLQEIFSNEMAKVDDSFFHRLEESFLVEEDKKHERHPIFGNIVDEVAYHEKYPTIYHLRKKLVDSTDKADLRLIYLALAHMIKFRGHFLIEGDLNPDNSDVDKLFIQLVQTYNQLFEENPINASGVDAKAILSARLSKSRKLENLIAQLPGEKKNGLFGNLIALSLGLTPNFKSNFDLAEDAKLQLSKDTYDDDLDNLLAQIGDQYADLFLAAKNLSDAILLSDILRVNTEITKAPLSASMIKRYDEHHQDLTLLKALVRQQLPEKYKEIFFDQSKNGYAGYIDGGASQEEFYKFIKPILEKMDGTEELLVKLKREDLLRKQRTFDNGSIPHQIHLGELHAILRRQEDFYPFLKDNREKIEKILTFRIPYYVGPLARGNSRFAWMTRKSEETITPWNFEEVVDKGASAQSFIERMTNFDKNLPNEKVLPKHSLLYEYFTVYNELTKVKYVTEGMRKPAFLSGEQKKAIVDLLFKTNRKVTVKQLKEDYFKKIECFDSVEISGVEDRFNASLGTYHDLLKIIKDKDFLDNEENEDILEDIVLTLTLFEDREMIEERLKTYAHLFDDKVMKQLKRRRYTGWGRLSRKLINGIRDKQSGKTILDFLKSDGFANRNFMQLIHDDSLTFKEDIQKAQVSGQGDSLHEHIANLAGSPAIKKGILQTVKVVDELVKVMGRHKPENIVIEMARENQTTQKGQKNSRERMKRIEEGIKELGSQILKEHPVENTQLQNEKLYLYYLQNGRDMYVDQELDINRLSDYDVDAIVPQSFLKDDSIDNKVLTRSDKNRGKSDNVPSEEVVKKMKNYWRQLLNAKLITQRKFDNLTKAERGGLSELDKAGFIKRQLVETRQITKHVAQILDSRMNTKYDENDKLIREVKVITLKSKLVSDFRKDFQFYKVREINNYHHAHDAYLNAVVGTALIKKYPKLESEFVYGDYKVYDVRKMIAKSEQEIGKATAKYFFYSNIMNFFKTEITLANGEIRKRPLIETNGETGEIVWDKGRDFATVRKVLSMPQVNIVKKTEVQTGGFSKESILPKRNSDKLIARKKDWDPKKYGGFDSPTVAYSVLVVAKVEKGKSKKLKSVKELLGITIMERSSFEKNPIDFLEAKGYKEVKKDLIIKLPKYSLFELENGRKRMLASAGELQKGNELALPSKYVNFLYLASHYEKLKGSPEDNEQKQLFVEQHKHYLDEIIEQISEFSKRVILADANLDKVLSAYNKHRDKPIREQAENIIHLFTLTNLGAPAAFKYFDTTIDRKRYTSTKEVLDATLIHQSITGLYETRIDLSQLGGDSGGSSGGSKRTADGSEFESPKKKRKVSGGSSGGSTLNIEDEYRLHETSKEPDVSLGSTWLSDFPQAWAETGGMGLAVRQAPLIIPLKATSTPVSIKQYPMSQEARLGIKPHIQRLLDQGILVPCQSPWNTPLLPVKKPGTNDYRPVQDLREVNKRVEDIHPTVPNPYNLLSGLPPSHQWYTVLDLKDAFFCLRLHPTSQPLFAFEWRDPEMGISGQLTWTRLPQGFKNSPTLFNEALHRDLADFRIQHPDLILLQYVDDLLLAATSELDCQQGTRALLQTLGNLGYRASAKKAQICQKQVKYLGYLLKEGQRWLTEARKETVMGQPTPKTPRQLREFLGKAGFCRLFIPGFAEMAAPLYPLTKPGTLFNWGPDQQKAYQEIKQALLTAPALGLPDLTKPFELFVDEKQGYAKGVLTQKLGPWRRPVAYLSKKLDPVAAGWPPCLRMVAAIAVLTKDAGKLTMGQPLVILAPHAVEALVKQPPDRWLSNARMTHYQALLLDTDRVQFGPVVALNPATLLPLPEEGLQHNCLDILAEAHGTRPDLTDQPLPDADHTWYTDGSSLLQEGQRKAGAAVTTETEVIWAKALPAGTSAQRAELIALTQALKMAEGKKLNVYTDSRYAFATAHIHGEIYRRRGWLTSEGKEIKNKDEILALLKALFLPKRLSIIHCPGHQKGHSAEARGNRMADQAARKAAITETPDTSTLLIENSSPSGGSKRTADGSEFESPKKKRKVGSGPAAKRVKLD

SEQ ID NO: 2345 - RNA, 115 nt, synthetic construct
  source 1..115: mol_type = other RNA
gggtcaggagccccccccctgaacccaggataaccctcaaagtcggggggcaaccgtcagggtcaggagccccccccctgaacccaggataaccctcaaagtcggggggcaaccc

SEQ ID NO: 2346 - RNA, 56 nt, synthetic construct
  source 1..56: mol_type = other RNA
gggtcaggagccccccccctgaacccaggaaaaccctcaaagtcggggggcaaccc

SEQ ID NO: 2347 - RNA, 56 nt, synthetic construct
  source 1..56: mol_type = other RNA
gggtcaggagccccccccctgcacccaggaaaaccctcaaagtcggggggcaaccc

SEQ ID NO: 2348 - RNA, 56 nt, synthetic construct
  source 1..56: mol_type = other RNA
gggtcaggagccccccccctgcacccaggataaccctcaaagtcggggggcaaccc

SEQ ID NO: 2349 - RNA, 60 nt, synthetic construct
  source 1..60: mol_type = other RNA
gtcagggtcaggagccccccccctgaacccaggaaaaccctcaaagtcggggggcaaccc

SEQ ID NO: 2350 - RNA, 60 nt, synthetic construct
  source 1..60: mol_type = other RNA
gtcagggtcaggagccccccccctgcacccaggaaaaccctcaaagtcggggggcaaccc

SEQ ID NO: 2351 - RNA, 51 nt, synthetic construct
  source 1..51: mol_type = other RNA
gggtcaggagccccccccctgaacccaggataaccctcaaagtcggggggc

SEQ ID NO: 2352 - RNA, 13 nt, synthetic construct
  source 1..13: mol_type = other RNA
tggtggtggtggt

SEQ ID NO: 2353 - RNA, 20 nt, synthetic construct
  source 1..20: mol_type = other RNA
gggacagggcagggacaggg

SEQ ID NO: 2354 - RNA, 21 nt, synthetic construct
  source 1..21: mol_type = other RNA
gggtccgggtctgggtctggg

SEQ ID NO: 2355 - RNA, 19 nt, synthetic construct
  source 1..19: mol_type = other RNA
gggcagggtctgggctggg

SEQ ID NO: 2356 - RNA, 19 nt, synthetic construct
  source 1..19: mol_type = other RNA
gggctgggatgggaaaggg

SEQ ID NO: 2357 - RNA, 19 nt, synthetic construct
  source 1..19: mol_type = other RNA
gggctctgggtgggccggg

SEQ ID NO: 2358 - RNA, 18 nt, synthetic construct
  source 1..18: mol_type = other RNA
gggctgggctgggcaggg

SEQ ID NO: 2359 - RNA, 17 nt, synthetic construct
  source 1..17: mol_type = other RNA
gggtgggctgggaaggg

SEQ ID NO: 2360 - RNA, 17 nt, synthetic construct
  source 1..17: mol_type = other RNA
gggagggagggctaggg

SEQ ID NO: 2361 - RNA, 17 nt, synthetic construct
  source 1..17: mol_type = other RNA
gggcagggctgggaggg

SEQ ID NO: 2362 - RNA, 16 nt, synthetic construct
  source 1..16: mol_type = other RNA
gggtgggagggctggg

SEQ ID NO: 2363 - RNA, 43 nt, synthetic construct
  source 1..43: mol_type = other RNA
gcgtaacctccatccgagttgcaagagagggaaacgcagtctc

SEQ ID NO: 2364 - RNA, 160 nt, synthetic construct
  source 1..160: mol_type = other RNA
ggaattgcgggaaaggggtcaacagccgttcagtaccaagtctcaggggaaactttgagatggccttgcaaagggtatggtaataagctgacggacatggtcctaaccacgcagccaagtcctaagtcaacagatcttctgttgatatggatgcagttca

SEQ ID NO: 2365 - RNA, 42 nt, synthetic construct
  source 1..42: mol_type = other RNA
ttgacgcggttctatctagttacgcgttaaaccaactagaaa

SEQ ID NO: 2366 - RNA, 42 nt, synthetic construct
  source 1..42: mol_type = other RNA
ttgacgcggttctatctacttacgcgttaaaccaactagaaa

SEQ ID NO: 2367 - RNA, 44 nt, synthetic construct
  source 1..44: mol_type = other RNA
cgcgagtctaggggataacgcgttaaacttcctagaaggcggtt

SEQ ID NO: 2368 - RNA, 44 nt, synthetic construct
  source 1..44: mol_type = other RNA
cgcggatctagattgtaacgcgttaaaccatctagaaggcggtt

SEQ ID NO: 2369 - RNA, 44 nt, synthetic construct
  source 1..44: mol_type = other RNA
cgcgtcgctaccgcccggcgcgttaaacacactagaaggcggtt

SEQ ID NO: 2370 - skipped

SEQ ID NO: 2371 - RNA, 68 nt, synthetic construct
  source 1..68: mol_type = other RNA
ggccggcatggtcccagcctcctcgctggcgccggctgggcaacatgcttcggcatggcgaatgggac

SEQ ID NO: 2372 - RNA, 75 nt, synthetic construct
  source 1..75: mol_type = other RNA
  misc_feature 69..75: note = This region may be 3-7 nucleotides
ggccggcatggtcccagcctcctcgctggcgccggctgggcaacatgcttcggcatggcgaatgggacttttttt

SEQ ID NO: 2373 - RNA, 18 nt, synthetic construct
  source 1..18: mol_type = other RNA
ggtgggagacgtcccacc

SEQ ID NO: 2374 - RNA, 16 nt, synthetic construct
  source 1..16: mol_type = other RNA
tgggagacgtcccacc

SEQ ID NO: 2375 - RNA, 23 nt, synthetic construct
  source 1..23: mol_type = other RNA
  misc_feature 17..23: note = This region may be 3-7 nucleotides
tgggagacgtcccaccttttttt

SEQ ID NO: 2376 - RNA, 24 nt, synthetic construct
  source 1..24: mol_type = other RNA
gagcagcatggcgtcgctgctcac

SEQ ID NO: 2377 - RNA, 21 nt, synthetic construct
  source 1..21: mol_type = other RNA
ccatcagttgacaccctgagg

SEQ ID NO: 2378 - RNA, 28 nt, synthetic construct
  source 1..28: mol_type = other RNA
  misc_feature 22..28: note = This region may be 3-7 nucleotides
ccatcagttgacaccctgaggttttttt

SEQ ID NO: 2379 - RNA, 28 nt, synthetic construct
  source 1..28: mol_type = other RNA
gcagacctaagtggtgacatatggtctg

SEQ ID NO: 2380 - RNA, 24 nt, synthetic construct
  source 1..24: mol_type = other RNA
catgcgattagaaataatcgcatg

SEQ ID NO: 2381 - RNA, 31 nt, synthetic construct
  source 1..31: mol_type = other RNA
  misc_feature 25..31: note = This region may be 3-7 nucleotides
catgcgattagaaataatcgcatgttttttt

SEQ ID NO: 2382 - RNA, 68 nt, synthetic construct; identical to SEQ ID NO: 2371
  source 1..68: mol_type = other RNA

SEQ ID NO: 2383 - RNA, 118 nt, synthetic construct
  source 1..118: mol_type = other RNA
tctgccatcaaagctgcgaccgtgctcagtctggtgggagacgtcccaccggccggcatggtcccagcctcctcgctggcgccggctgggcaacatgcttcggcatggcgaatgggac

SEQ ID NO: 2384 - protein, 16 aa, synthetic construct
RQIKIWFQNRRMKWKK

SEQ ID NO: 2385 - protein, 11 aa, synthetic construct
YGRKKRRQRRR

SEQ ID NO: 2386 - skipped

SEQ ID NO: 2387 - protein, 34 aa, synthetic construct
SGGSSGGSKRTADGSEFESPKKKRKVSGGSSGGS

SEQ ID NO: 2388 - protein, 9 aa, synthetic construct
GGSGGSGGS

SEQ ID NO: 2389 - protein, 6 aa, synthetic construct
GGSGGS

SEQ ID NO: 2390 - skipped

SEQ ID NO: 2391 - protein, 1053 aa, Staphylococcus aureus
MKRNYILGLDIGITSVGYGIIDYETRDVIDAGVRLFKEANVENNEGRRSKRGARRLKRRRRHRIQRVKKLLFDYNLLTDHSELSGINPYEARVKGLSQKLSEEEFSAALLHLAKRRGVHNVNEVEEDTGNELSTKEQISRNSKALEEKYVAELQLERLKKDGEVRGSINRFKTSDYVKEAKQLLKVQKAYHQLDQSFIDTYIDLLETRRTYYEGPGEGSPFGWKDIKEWYEMLMGHCTYFPEELRSVKYAYNADLYNALNDLNNLVITRDENEKLEYYEKFQIIENVFKQKKKPTLKQIAKEILVNEEDIKGYRVTSTGKPEFTNLKVYHDIKDITARKEIIENAELLDQIAKILTIYQSSEDIQEELTNLNSELTQEEIEQISNLKGYTGTHNLSLKAINLILDELWHTNDNQIAIFNRLKLVPKKVDLSQQKEIPTTLVDDFILSPVVKRSFIQSIKVINAIIKKYGLPNDIIIELAREKNSKDAQKMINEMQKRNRQTNERIEEIIRTTGKENAKYLIEKIKLHDMQEGKCLYSLEAIPLEDLLNNPFNYEVDHIIPRSVSFDNSFNNKVLVKQEENSKKGNRTPFQYLSSSDSKISYETFKKHILNLAKGKGRISKTKKEYLLEERDINRFSVQKDFINRNLVDTRYATRGLMNLLRSYFRVNNLDVKVKSINGGFTSFLRRKWKFKKERNKGYKHHAEDALIIANADFIFKEWKKLDKAKKVMENQMFEEKQAESMPEIETEQEYKEIFITPHQIKHIKDFKDYKYSHRVDKKPNRELINDTLYSTRKDDKGNTLIVNNLNGLYDKDNDKLKKLINKSPEKLLMYHHDPQTYQKLKLIMEQYGDEKNPLYKYYEETGNYLTKYSKKDNGPVIKKIKYYGNKLNAHLDITDDYPNSRNKVVKLSLKPYRFDVYLDNGVYKFVTVKNLDVIKKENYYEVNSKCYEEAKKLKKISNQAEFIASFYNNDLIKINGELYRVIGVNNDLLNRIEVNMIDITYREYLENMNDKRPPRIIKTIASKTQSIKKYSTDILGNLYEVKSKKHPQIIKKG

SEQ ID NO: 2392 - protein, 1053 aa, synthetic construct
MKRNYILGLDIGITSVGYGIIDYETRDVIDAGVRLFKEANVENNEGRRSKRGARRLKRRRRHRIQRVKKLLFDYNLLTDHSELSGINPYEARVKGLSQKLSEEEFSAALLHLAKRRGVHNVNEVEEDTGNELSTKEQISRNSKALEEKYVAELQLERLKKDGEVRGSINRFKTSDYVKEAKQLLKVQKAYHQLDQSFIDTYIDLLETRRTYYEGPGEGSPFGWKDIKEWYEMLMGHCTYFPEELRSVKYAYNADLYNALNDLNNLVITRDENEKLEYYEKFQIIENVFKQKKKPTLKQIAKEILVNEEDIKGYRVTSTGKPEFTNLKVYHDIKDITARKEIIENAELLDQIAKILTIYQSSEDIQEELTNLNSELTQEEIEQISNLKGYTGTHNLSLKAINLILDELWHTNDNQIAIFNRLKLVPKKVDLSQQKEIPTTLVDDFILSPVVKRSFIQSIKVINAIIKKYGLPNDIIIELAREKNSKDAQKMINEMQKRNRQTNERIEEIIRTTGKENAKYLIEKIKLHDMQEGKCLYSLEAIPLEDLLNNPFNYEVDHIIPRSVSFDNSFNNKVLVKQEEASKKGNRTPFQYLSSSDSKISYETFKKHILNLAKGKGRISKTKKEYLLEERDINRFSVQKDFINRNLVDTRYATRGLMNLLRSYFRVNNLDVKVKSINGGFTSFLRRKWKFKKERNKGYKHHAEDALIIANADFIFKEWKKLDKAKKVMENQMFEEKQAESMPEIETEQEYKEIFITPHQIKHIKDFKDYKYSHRVDKKPNRELINDTLYSTRKDDKGNTLIVNNLNGLYDKDNDKLKKLINKSPEKLLMYHHDPQTYQKLKLIMEQYGDEKNPLYKYYEETGNYLTKYSKKDNGPVIKKIKYYGNKLNAHLDITDDYPNSRNKVVKLSLKPYRFDVYLDNGVYKFVTVKNLDVIKKENYYEVNSKCYEEAKKLKKISNQAEFIASFYNNDLIKINGELYRVIGVNNDLLNRIEVNMIDITYREYLENMNDKRPPRIIKTIASKTQSIKKYSTDILGNLYEVKSKKHPQIIKKG

SEQ ID NO: 2393 - protein, 1052 aa, synthetic construct
KRNYILGLDIGITSVGYGIIDYETRDVIDAGVRLFKEANVENNEGRRSKRGARRLKRRRRHRIQRVKKLLFDYNLLTDHSELSGINPYEARVKGLSQKLSEEEFSAALLHLAKRRGVHNVNEVEEDTGNELSTKEQISRNSKALEEKYVAELQLERLKKDGEVRGSINRFKTSDYVKEAKQLLKVQKAYHQLDQSFIDTYIDLLETRRTYYEGPGEGSPFGWKDIKEWYEMLMGHCTYFPEELRSVKYAYNADLYNALNDLNNLVITRDENEKLEYYEKFQIIENVFKQKKKPTLKQIAKEILVNEEDIKGYRVTSTGKPEFTNLKVYHDIKDITARKEIIENAELLDQIAKILTIYQSSEDIQEELTNLNSELTQEEIEQISNLKGYTGTHNLSLKAINLILDELWHTNDNQIAIFNRLKLVPKKVDLSQQKEIPTTLVDDFILSPVVKRSFIQSIKVINAIIKKYGLPNDIIIELAREKNSKDAQKMINEMQKRNRQTNERIEEIIRTTGKENAKYLIEKIKLHDMQEGKCLYSLEAIPLEDLLNNPFNYEVDHIIPRSVSFDNSFNNKVLVKQEEASKKGNRTPFQYLSSSDSKISYETFKKHILNLAKGKGRISKTKKEYLLEERDINRFSVQKDFINRNLVDTRYATRGLMNLLRSYFRVNNLDVKVKSINGGFTSFLRRKWKFKKERNKGYKHHAEDALIIANADFIFKEWKKLDKAKKVMENQMFEEKQAESMPEIETEQEYKEIFITPHQIKHIKDFKDYKYSHRVDKKPNRELINDTLYSTRKDDKGNTLIVNNLNGLYDKDNDKLKKLINKSPEKLLMYHHDPQTYQKLKLIMEQYGDEKNPLYKYYEETGNYLTKYSKKDNGPVIKKIKYYGNKLNAHLDITDDYPNSRNKVVKLSLKPYRFDVYLDNGVYKFVTVKNLDVIKKENYYEVNSKCYEEAKKLKKISNQAEFIASFYNNDLIKINGELYRVIGVNNDLLNRIEVNMIDITYREYLENMNDKRPPRIIKTIASKTQSIKKYSTDILGNLYEVKSKKHPQIIKKG

SEQ ID NO: 2394-2400 - skipped (7 entries)

SEQ ID NO: 2401 - RNA, 49 nt, synthetic construct
  source 1..49: mol_type = other RNA
ctactgactccttcaacgactctgggtgttacaggttcgctcacgccta

SEQ ID NO: 2402 - RNA, 45 nt, synthetic construct
  source 1..45: mol_type = other RNA
tgactccttcaacgactctgggtgttacaggttcgctcacgccta

SEQ ID NO: 2403 - RNA, 61 nt, synthetic construct
  source 1..61: mol_type = other RNA
gatttgccgcccctactgactccttcaacgactctgggtgttacaggttcgctcacgccta

SEQ ID NO: 2404 - RNA, 56 nt, synthetic construct
  source 1..56: mol_type = other RNA
gccgcccctactgactccttcaacgactctgggtgttacaggttcgctcacgccta

SEQ ID NO: 2405 - RNA, 38 nt, synthetic construct
  source 1..38: mol_type = other RNA
gatttgccgcccctactgactccttcaacgactctggg

SEQ ID NO: 2406 - RNA, 33 nt, synthetic construct
  source 1..33: mol_type = other RNA
gccgcccctactgactccttcaacgactctggg

SEQ ID NO: 2407 - RNA, 49 nt, synthetic construct
  source 1..49: mol_type = other RNA
acactctttgagatttgccgcccctactgactccttcaacgactctggg

SEQ ID NO: 2408 - RNA, 45 nt, synthetic construct
  source 1..45: mol_type = other RNA
tctttgagatttgccgcccctactgactccttcaacgactctggg

SEQ ID NO: 2409 - RNA, 60 nt, synthetic construct
  source 1..60: mol_type = other RNA
agcactgggccacactctttgagatttgccgcccctactgactccttcaacgactctggg

SEQ ID NO: 2410 - RNA, 55 nt, synthetic construct
  source 1..55: mol_type = other RNA
tgggccacactctttgagatttgccgcccctactgactccttcaacgactctggg

SEQ ID NO: 2411 - RNA, 37 nt, synthetic construct
  source 1..37: mol_type = other RNA
agcactgggccacactctttgagatttgccgccccta

SEQ ID NO: 2412 - RNA, 32 nt, synthetic construct
  source 1..32: mol_type = other RNA
tgggccacactctttgagatttgccgccccta

SEQ ID NO: 2413 - RNA, 49 nt, synthetic construct
  source 1..49: mol_type = other RNA
gccgctactttcagcactgggccacactctttgagatttgccgccccta

SEQ ID NO: 2414 - RNA, 44 nt, synthetic construct
  source 1..44: mol_type = other RNA
tactttcagcactgggccacactctttgagatttgccgccccta

SEQ ID NO: 2415-2499 - skipped (85 entries)

SEQ ID NO: 2500 - RNA, 50 nt, synthetic construct
  source 1..50: mol_type = other RNA
acacccagagtcgttgaaggagtcagtaggggcggcaaatctcaaagagt

SEQ ID NO: 2501 - RNA, 44 nt, synthetic construct
  source 1..44: mol_type = other RNA
agagtcgttgaaggagtcagtaggggcggcaaatctcaaagagt

SEQ ID NO: 2502 - RNA, 61 nt, synthetic construct
  source 1..61: mol_type = other RNA
gttgaaggagtcagtaggggcggcaaatctcaaagagtgtggcccagtgctgaaagtagcg

SEQ ID NO: 2503 - RNA, 56 nt, synthetic construct
  source 1..56: mol_type = other RNA
aggagtcagtaggggcggcaaatctcaaagagtgtggcccagtgctgaaagtagcg

SEQ ID NO: 2504 - RNA, 38 nt, synthetic construct
  source 1..38: mol_type = other RNA
gttgaaggagtcagtaggggcggcaaatctcaaagagt

SEQ ID NO: 2505 - RNA, 33 nt, synthetic construct
  source 1..33: mol_type = other RNA
aggagtcagtaggggcggcaaatctcaaagagt

SEQ ID NO: 2506 - RNA, 49 nt, synthetic construct
  source 1..49: mol_type = other RNA
agtaggggcggcaaatctcaaagagtgtggcccagtgctgaaagtagcg

SEQ ID NO: 2507 - RNA, 45 nt, synthetic construct
  source 1..45: mol_type = other RNA
ggggcggcaaatctcaaagagtgtggcccagtgctgaaagtagcg

SEQ ID NO: 2508 - RNA, 60 nt, synthetic construct
  source 1..60: mol_type = other RNA
aaatctcaaagagtgtggcccagtgctgaaagtagcggcggaccatgcttgcatccttta

SEQ ID NO: 2509 - RNA, 55 nt, synthetic construct
  source 1..55: mol_type = other RNA
tcaaagagtgtggcccagtgctgaaagtagcggcggaccatgcttgcatccttta

SEQ ID NO: 2510 - RNA, 37 nt, synthetic construct
  source 1..37: mol_type = other RNA
aaatctcaaagagtgtggcccagtgctgaaagtagcg

SEQ ID NO: 2511 - RNA, 32 nt, synthetic construct
  source 1..32: mol_type = other RNA
tcaaagagtgtggcccagtgctgaaagtagcg

SEQ ID NO: 2512 - RNA, 50 nt, synthetic construct
  source 1..50: mol_type = other RNA
gagtgtggcccagtgctgaaagtagcggcggaccatgcttgcatccttta

SEQ ID NO: 2513 - RNA, 45 nt, synthetic construct
  source 1..45: mol_type = other RNA
tggcccagtgctgaaagtagcggcggaccatgcttgcatccttta

SEQ ID NO: 2514 - RNA, 157 nt, synthetic construct
  source 1..157: mol_type = other RNA
gcagagctgtgtgaccttgggttttagagctagaaatagcaagttaaaataaggctagtccgttatcaacttgaaaaagtggcaccgagtcggtgcctactgactccttcaacgactctgggtgttacaggttcgctcacgcctaaggtcacacagc

SEQ ID NO: 2515 - RNA, 153 nt, synthetic construct
  source 1..153: mol_type = other RNA
gcagagctgtgtgaccttgggttttagagctagaaatagcaagttaaaataaggctagtccgttatcaacttgaaaaagtggcaccgagtcggtgctgactccttcaacgactctgggtgttacaggttcgctcacgcctaaggtcacacagc

SEQ ID NO: 2516 - RNA, 169 nt, synthetic construct
  source 1..169: mol_type = other RNA
gcagagctgtgtgaccttgggttttagagctagaaatagcaagttaaaataaggctagtccgttatcaacttgaaaaagtggcaccgagtcggtgcgatttgccgcccctactgactccttcaacgactctgggtgttacaggttcgctcacgcctaaggtcacacagc

SEQ ID NO: 2517 - RNA, 164 nt, synthetic construct
  source 1..164: mol_type = other RNA
gcagagctgtgtgaccttgggttttagagctagaaatagcaagttaaaataaggctagtccgttatcaacttgaaaaagtggcaccgagtcggtgcgccgcccctactgactccttcaacgactctgggtgttacaggttcgctcacgcctaaggtcacacagc

SEQ ID NO: 2518 - RNA, 158 nt, synthetic construct
  source 1..158: mol_type = other RNA
gcagagctgtgtgaccttgggttttagagctagaaatagcaagttaaaataaggctagtccgttatcaacttgaaaaagtggcaccgagtcggtgcctactgactccttcaacgactctgggtgttacaggttcgctcacgcctaaggtcacacagct

SEQ ID NO: 2519 - RNA, 154 nt, synthetic construct
  source 1..154: mol_type = other RNA
gcagagctgtgtgaccttgggttttagagctagaaatagcaagttaaaataaggctagtccgttatcaacttgaaaaagtggcaccgagtcggtgctgactccttcaacgactctgggtgttacaggttcgctcacgcctaaggtcacacagct

SEQ ID NO: 2520 - RNA, 170 nt, synthetic construct
  source 1..170: mol_type = other RNA
gcagagctgtgtgaccttgggttttagagctagaaatagcaagttaaaataaggctagtccgttatcaacttgaaaaagtggcaccgagtcggtgcgatttgccgcccctactgactccttcaacgactctgggtgttacaggttcgctcacgcctaaggtcacacagct

SEQ ID NO: 2521 - RNA, 165 nt, synthetic construct
  source 1..165: mol_type = other RNA
gcagagctgtgtgaccttgggttttagagctagaaatagcaagttaaaataaggctagtccgttatcaacttgaaaaagtggcaccgagtcggtgcgccgcccctactgactccttcaacgactctgggtgttacaggttcgctcacgcctaaggtcacacagct

SEQ ID NO: 2522 - RNA, 146 nt, synthetic construct
  source 1..146: mol_type = other RNA
tatctgacccagttacgccagttttagagctagaaatagcaagttaaaataaggctagtccgttatcaacttgaaaaagtggcaccgagtcggtgcgatttgccgcccctactgactccttcaacgactctgggcgtaactgggtc

SEQ ID NO: 2523 - RNA, 141 nt, synthetic construct
  source 1..141: mol_type = other RNA
tatctgacccagttacgccagttttagagctagaaatagcaagttaaaataaggctagtccgttatcaacttgaaaaagtggcaccgagtcggtgcgccgcccctactgactccttcaacgactctgggcgtaactgggtc

SEQ ID NO: 2524 - RNA, 157 nt, synthetic construct
  source 1..157: mol_type = other RNA
tatctgacccagttacgccagttttagagctagaaatagcaagttaaaataaggctagtccgttatcaacttgaaaaagtggcaccgagtcggtgcacactctttgagatttgccgcccctactgactccttcaacgactctgggcgtaactgggtc

SEQ ID NO: 2525 - RNA, 153 nt, synthetic construct
  source 1..153: mol_type = other RNA
tatctgacccagttacgccagttttagagctagaaatagcaagttaaaataaggctagtccgttatcaacttgaaaaagtggcaccgagtcggtgctctttgagatttgccgcccctactgactccttcaacgactctgggcgtaactgggtc

SEQ ID NO: 2526 - RNA, 168 nt, synthetic construct
  source 1..168: mol_type = other RNA
tatctgacccagttacgccagttttagagctagaaatagcaagttaaaataaggctagtccgttatcaacttgaaaaagtggcaccgagtcggtgcagcactgggccacactctttgagatttgccgcccctactgactccttcaacgactctgggcgtaactgggtc

SEQ ID NO: 2527 - RNA, 163 nt, synthetic construct
  source 1..163: mol_type = other RNA
tatctgacccagttacgccagttttagagctagaaatagcaagttaaaataaggctagtccgttatcaacttgaaaaagtggcaccgagtcggtgctgggccacactctttgagatttgccgcccctactgactccttcaacgactctgggcgtaactgggtc

SEQ ID NO: 2528 - RNA, 147 nt, synthetic construct
  source 1..147: mol_type = other RNA
tatctgacccagttacgccagttttagagctagaaatagcaagttaaaataaggctagtccgttatcaacttgaaaaagtggcaccgagtcggtgcgatttgccgcccctactgactccttcaacgactctgggcgtaactgggtca

SEQ ID NO: 2529 - RNA, 142 nt, synthetic construct
  source 1..142: mol_type = other RNA
tatctgacccagttacgccagttttagagctagaaatagcaagttaaaataaggctagtccgttatcaacttgaaaaagtggcaccgagtcggtgcgccgcccctactgactccttcaacgactctgggcgtaactgggtca

SEQ ID NO: 2530 - RNA, 158 nt, synthetic construct
  source 1..158: mol_type = other RNA
tatctgacccagttacgccagttttagagctagaaatagcaagttaaaataaggctagtccgttatcaacttgaaaaagtggcaccgagtcggtgcacactctttgagatttgccgcccctactgactccttcaacgactctgggcgtaactgggtca

SEQ ID NO: 2531 - RNA, 154 nt, synthetic construct
  source 1..154: mol_type = other RNA
tatctgacccagttacgccagttttagagctagaaatagcaagttaaaataaggctagtccgttatcaacttgaaaaagtggcaccgagtcggtgctctttgagatttgccgcccctactgactccttcaacgactctgggcgtaactgggtca

SEQ ID NO: 2532 - RNA, 169 nt, synthetic construct
  source 1..169: mol_type = other RNA
tatctgacccagttacgccagttttagagctagaaatagcaagttaaaataaggctagtccgttatcaacttgaaaaagtggcaccgagtcggtgcagcactgggccacactctttgagatttgccgcccctactgactccttcaacgactctgggcgtaactgggtca

SEQ ID NO: 2533 - RNA, 164 nt, synthetic construct
  source 1..164: mol_type = other RNA
tatctgacccagttacgccagttttagagctagaaatagcaagttaaaataaggctagtccgttatcaacttgaaaaagtggcaccgagtcggtgctgggccacactctttgagatttgccgcccctactgactccttcaacgactctgggcgtaactgggtca

SEQ ID NO: 2534 - RNA, 145 nt, synthetic construct
  source 1..145: mol_type = other RNA
gtggtagagggtgtttcacggttttagagctagaaatagcaagttaaaataaggctagtccgttatcaacttgaaaaagtggcaccgagtcggtgcagcactgggccacactctttgagatttgccgcccctagaaacaccctct

SEQ ID NO: 2535 - RNA, 140 nt, synthetic construct
  source 1..140: mol_type = other RNA
gtggtagagggtgtttcacggttttagagctagaaatagcaagttaaaataaggctagtccgttatcaacttgaaaaagtggcaccgagtcggtgctgggccacactctttgagatttgccgcccctagaaacaccctct

SEQ ID NO: 2536 - RNA, 157 nt, synthetic construct
  source 1..157: mol_type = other RNA
gtggtagagggtgtttcacggttttagagctagaaatagcaagttaaaataaggctagtccgttatcaacttgaaaaagtggcaccgagtcggtgcgccgctactttcagcactgggccacactctttgagatttgccgcccctagaaacaccctct

SEQ ID NO: 2537 - RNA, 152 nt, synthetic construct
  source 1..152: mol_type = other RNA
gtggtagagggtgtttcacggttttagagctagaaatagcaagttaaaataaggctagtccgttatcaacttgaaaaagtggcaccgagtcggtgctactttcagcactgggccacactctttgagatttgccgcccctagaaacaccctct

SEQ ID NO: 2538 - RNA, 146 nt, synthetic construct
  source 1..146: mol_type = other RNA
gtggtagagggtgtttcacggttttagagctagaaatagcaagttaaaataaggctagtccgttatcaacttgaaaaagtggcaccgagtcggtgcagcactgggccacactctttgagatttgccgcccctagaaacaccctcta

SEQ ID NO: 2539 - RNA, 141 nt, synthetic construct
  source 1..141: mol_type = other RNA
gtggtagagggtgtttcacggttttagagctagaaatagcaagttaaaataaggctagtccgttatcaacttgaaaaagtggcaccgagtcggtgctgggccacactctttgagatttgccgcccctagaaacaccctcta

SEQ ID NO: 2540 - RNA, 158 nt, synthetic construct
  source 1..158: mol_type = other RNA
gtggtagagggtgtttcacggttttagagctagaaatagcaagttaaaataaggctagtccgttatcaacttgaaaaagtggcaccgagtcggtgcgccgctactttcagcactgggccacactctttgagatttgccgcccctagaaacaccctcta

SEQ ID NO: 2541 - RNA, 153 nt, synthetic construct
  source 1..153: mol_type = other RNA
gtggtagagggtgtttcacggttttagagctagaaatagcaagttaaaataaggctagtccgttatcaacttgaaaaagtggcaccgagtcggtgctactttcagcactgggccacactctttgagatttgccgcccctagaaacaccctcta

SEQ ID NO: 2542 - RNA, 155 nt, synthetic construct
  source 1..155: mol_type = other RNA
actctgctgatggccagacggttttagagctagaaatagcaagttaaaataaggctagtccgttatcaacttgaaaaagtggcaccgagtcggtgcacacccagagtcgttgaaggagtcagtaggggcggcaaatctcaaagagtctggccatc

SEQ ID NO: 2543 - RNA, 149 nt, synthetic construct
  source 1..149: mol_type = other RNA
actctgctgatggccagacggttttagagctagaaatagcaagttaaaataaggctagtccgttatcaacttgaaaaagtggcaccgagtcggtgcagagtcgttgaaggagtcagtaggggcggcaaatctcaaagagtctggccatc

SEQ ID NO: 2544 - RNA, 143 nt, synthetic construct
  source 1..143: mol_type = other RNA
actctgctgatggccagacggttttagagctagaaatagcaagttaaaataaggctagtccgttatcaacttgaaaaagtggcaccgagtcggtgcgttgaaggagtcagtaggggcggcaaatctcaaagagtctggccatc

SEQ ID NO: 2545 - RNA, 138 nt, synthetic construct
  source 1..138: mol_type = other RNA
actctgctgatggccagacggttttagagctagaaatagcaagttaaaataaggctagtccgttatcaacttgaaaaagtggcaccgagtcggtgcaggagtcagtaggggcggcaaatctcaaagagtctggccatc

SEQ ID NO: 2546 - RNA, 157 nt, synthetic construct
  source 1..157: mol_type = other RNA
actctgctgatggccagacggttttagagctagaaatagcaagttaaaataaggctagtccgttatcaacttgaaaaagtggcaccgagtcggtgcacacccagagtcgttgaaggagtcagtaggggcggcaaatctcaaagagtctggccatcag

SEQ ID NO: 2547 - RNA, 151 nt, synthetic construct
  source 1..151: mol_type = other RNA
actctgctgatggccagacggttttagagctagaaatagcaagttaaaataaggctagtccgttatcaacttgaaaaagtggcaccgagtcggtgcagagtcgttgaaggagtcagtaggggcggcaaatctcaaagagtctggccatcag

SEQ ID NO: 2548 - RNA, 140 nt, synthetic construct
  source 1..140: mol_type = other RNA
actctgctgatggccagacggttttagagctagaaatagcaagttaaaataaggctagtccgttatcaacttgaaaaagtggcaccgagtcggtgcaggagtcagtaggggcggcaaatctcaaagagtctggccatcag

SEQ ID NO: 2549 - RNA, 168 nt, synthetic construct
  source 1..168: mol_type = other RNA
gtgaagacaagggcctccaggttttagagctagaaatagcaagttaaaataaggctagtccgttatcaacttgaaaaagtggcaccgagtcggtgcgttgaaggagtcagtaggggcggcaaatctcaaagagtgtggcccagtgctgaaagtagcggaggcccttgt

SEQ ID NO: 2550 - RNA, 163 nt, synthetic construct
  source 1..163: mol_type = other RNA
gtgaagacaagggcctccaggttttagagctagaaatagcaagttaaaataaggctagtccgttatcaacttgaaaaagtggcaccgagtcggtgcaggagtcagtaggggcggcaaatctcaaagagtgtggcccagtgctgaaagtagcggaggcccttgt

SEQ ID NO: 2551 - RNA, 156 nt, synthetic construct
  source 1..156: mol_type = other RNA
gtgaagacaagggcctccaggttttagagctagaaatagcaagttaaaataaggctagtccgttatcaacttgaaaaagtggcaccgagtcggtgcagtaggggcggcaaatctcaaagagtgtggcccagtgctgaaagtagcggaggcccttgt

SEQ ID NO: 2552 - RNA, 152 nt, synthetic construct
  source 1..152: mol_type = other RNA
gtgaagacaagggcctccaggttttagagctagaaatagcaagttaaaataaggctagtccgttatcaacttgaaaaagtggcaccgagtcggtgcggggcggcaaatctcaaagagtgtggcccagtgctgaaagtagcggaggcccttgt

SEQ ID NO: 2553 - RNA, 144 nt, synthetic construct
  source 1..144: mol_type = other RNA
gtgaagacaagggcctccaggttttagagctagaaatagcaagttaaaataaggctagtccgttatcaacttgaaaaagtggcaccgagtcggtgcaaatctcaaagagtgtggcccagtgctgaaagtagcggaggcccttgt

SEQ ID NO: 2554 - RNA, 139 nt, synthetic construct
  source 1..139: mol_type = other RNA
gtgaagacaagggcctccaggttttagagctagaaatagcaagttaaaataaggctagtccgttatcaacttgaaaaagtggcaccgagtcggtgctcaaagagtgtggcccagtgctgaaagtagcggaggcccttgt

SEQ ID NO: 2555 - RNA, 170 nt, synthetic construct
  source 1..170: mol_type = other RNA
gtgaagacaagggcctccaggttttagagctagaaatagcaagttaaaataaggctagtccgttatcaacttgaaaaagtggcaccgagtcggtgcgttgaaggagtcagtaggggcggcaaatctcaaagagtgtggcccagtgctgaaagtagcggaggcccttgtct

SEQ ID NO: 2556 - RNA, 165 nt, synthetic construct
  source 1..165: mol_type = other RNA
gtgaagacaagggcctccaggttttagagctagaaatagcaagttaaaataaggctagtccgttatcaacttgaaaaagtggcaccgagtcggtgcaggagtcagtaggggcggcaaatctcaaagagtgtggcccagtgctgaaagtagcggaggcccttgtct

SEQ ID NO: 2557 - RNA, 158 nt, synthetic construct
  source 1..158: mol_type = other RNA
gtgaagacaagggcctccaggttttagagctagaaatagcaagttaaaataaggctagtccgttatcaacttgaaaaagtggcaccgagtcggtgcagtaggggcggcaaatctcaaagagtgtggcccagtgctgaaagtagcggaggcccttgtct

SEQ ID NO: 2558 - RNA, 154 nt, synthetic construct
  source 1..154: mol_type = other RNA
gtgaagacaagggcctccaggttttagagctagaaatagcaagttaaaataaggctagtccgttatcaacttgaaaaagtggcaccgagtcggtgcggggcggcaaatctcaaagagtgtggcccagtgctgaaagtagcggaggcccttgtct

SEQ ID NO: 2559 - RNA, 146 nt, synthetic construct
  source 1..146: mol_type = other RNA
gtgaagacaagggcctccaggttttagagctagaaatagcaagttaaaataaggctagtccgttatcaacttgaaaaagtggcaccgagtcggtgcaaatctcaaagagtgtggcccagtgctgaaagtagcggaggcccttgtct

SEQ ID NO: 2560 - RNA, 141 nt, synthetic construct
  source 1..141: mol_type = other RNA
gtgaagacaagggcctccaggttttagagctagaaatagcaagttaaaataaggctagtccgttatcaacttgaaaaagtggcaccgagtcggtgctcaaagagtgtggcccagtgctgaaagtagcggaggcccttgtct

SEQ ID NO: 2561 - RNA, 167 nt, synthetic construct
  source 1..167: mol_type = other RNA
gccccagagtctgtgcacaggttttagagctagaaatagcaagttaaaataaggctagtccgttatcaacttgaaaaagtggcaccgagtcggtgcaaatctcaaagagtgtggcccagtgctgaaagtagcggcggaccatgcttgcatcctttatgcacagactc

SEQ ID NO: 2562 - RNA, 162 nt, synthetic construct
  source 1..162: mol_type = other RNA
gccccagagtctgtgcacaggttttagagctagaaatagcaagttaaaataaggctagtccgttatcaacttgaaaaagtggcaccgagtcggtgctcaaagagtgtggcccagtgctgaaagtagcggcggaccatgcttgcatcctttatgcacagactc

SEQ ID NO: 2563 - RNA, 157 nt, synthetic construct
  source 1..157: mol_type = other RNA
gccccagagtctgtgcacaggttttagagctagaaatagcaagttaaaataaggctagtccgttatcaacttgaaaaagtggcaccgagtcggtgcgagtgtggcccagtgctgaaagtagcggcggaccatgcttgcatcctttatgcacagactc

SEQ ID NO: 2564 - RNA, 152 nt, synthetic construct
  source 1..152: mol_type = other RNA
gccccagagtctgtgcacaggttttagagctagaaatagcaagttaaaataaggctagtccgttatcaacttgaaaaagtggcaccgagtcggtgctggcccagtgctgaaagtagcggcggaccatgcttgcatcctttatgcacagactc

SEQ ID NO: 2565 - RNA, 168 nt, synthetic construct
  source 1..168: mol_type = other RNA
gccccagagtctgtgcacaggttttagagctagaaatagcaagttaaaataaggctagtccgttatcaacttgaaaaagtggcaccgagtcggtgcaaatctcaaagagtgtggcccagtgctgaaagtagcggcggaccatgcttgcatcctttatgcacagactct

SEQ ID NO: 2566 - RNA, 163 nt, synthetic construct
  source 1..163: mol_type = other RNA
gccccagagtctgtgcacaggttttagagctagaaatagcaagttaaaataaggctagtccgttatcaacttgaaaaagtggcaccgagtcggtgctcaaagagtgtggcccagtgctgaaagtagcggcggaccatgcttgcatcctttatgcacagactct

SEQ ID NO: 2567 - RNA, 153 nt, synthetic construct
  source 1..153: mol_type = other RNA
gccccagagtctgtgcacaggttttagagctagaaatagcaagttaaaataaggctagtccgttatcaacttgaaaaagtggcaccgagtcggtgctggcccagtgctgaaagtagcggcggaccatgcttgcatcctttatgcacagactct

SEQ ID NO: 2568 - DNA, 198 bp, Homo sapiens
  source 1..198: mol_type = genomic DNA
  misc_feature 1..198: note = This sequence may encompass 10-66 GAA repeats
gaagaagaagaagaagaagaagaagaagaagaaggaaaagaagaagaagaagaagaagaagaagaagaagaagaagaagaagaagaagaagaagaagaagaagaagaagaagaagaagaagaagaagaagaagaagaagaagaagaagaagaagaagaagaagaagaagaagaagaagaagaagaagaagaagaagaa

SEQ ID NO: 2569 - DNA, 99 bp, Homo sapiens
  source 1..99: mol_type = genomic DNA
  misc_feature 1..99: note = This sequence may encompass 5-33 GAA repeats
gaagaagaagaagaagaagaagaagaagaagaagaagaagaagaagaagaagaagaagaagaagaagaagaagaagaagaagaagaagaagaagaagaa

SEQ ID NO: 2570 - DNA, 78 bp, Homo sapiens
  source 1..78: mol_type = genomic DNA
  misc_feature 1..78: note = This sequence may encompass 12-33 GAA repeats
gaagaagaagaagaagaagaagaagaagaagaagaagaagaagaagaagaagaagaagaagaagaagaagaagaagaa

SEQ ID NO: 2571 - DNA, 81 bp, Homo sapiens
  source 1..81: mol_type = genomic DNA
gaagaagaagaagaagaagaagaagaagaagaagaagaagaagaagaagaagaagaagaagaagaagaagaagaagaagaa

SEQ ID NO: 2572 - DNA, 3900 bp, Homo sapiens
  source 1..3900: mol_type = genomic DNA
  misc_feature 1..3900: note = This sequence may encompass 66-1300 GAA repeats
gaagaagaagaagaagaagaagaagaagaagaagaagaagaagaagaagaagaagaagaagaagaagaagaagaagaagaagaagaagaagaagaagaagaagaagaagaagaagaagaagaagaagaagaagaagaagaagaagaagaagaagaagaagaagaagaagaagaagaagaagaagaagaagaagaagaagaagaagaagaagaagaagaagaagaagaagaagaagaagaagaagaagaagaagaagaagaagaagaagaagaagaagaagaagaagaagaagaagaagaagaagaagaagaagaagaagaagaagaagaagaagaagaagaagaagaagaagaagaagaagaagaagaagaagaagaagaagaagaagaagaagaagaagaagaagaagaagaagaagaagaagaagaagaagaagaagaagaagaagaagaagaagaagaagaagaagaagaagaagaagaagaagaagaagaagaagaagaagaagaagaagaagaagaagaagaagaagaagaagaagaagaagaagaagaagaagaagaagaagaagaagaagaagaagaagaagaagaagaagaagaagaagaagaagaagaagaagaagaagaagaagaagaagaagaagaagaagaagaagaagaagaagaagaagaagaagaagaagaagaagaagaagaagaagaagaagaagaagaagaagaagaagaagaagaagaagaagaagaagaagaagaagaagaagaagaagaagaagaagaagaagaagaagaagaagaagaagaagaagaagaagaagaagaagaagaagaagaagaagaagaagaagaagaagaagaagaagaagaagaagaagaagaagaagaagaagaagaagaagaagaagaagaagaagaagaagaagaagaagaagaagaagaagaagaagaagaagaagaagaagaagaagaagaagaagaagaagaagaagaagaagaagaagaagaagaagaagaagaagaagaagaagaagaagaagaagaagaagaagaagaagaagaagaagaagaagaagaagaagaagaagaagaagaagaagaagaagaagaagaagaagaagaagaagaagaagaagaagaagaagaagaagaagaagaagaagaagaagaagaagaagaagaagaagaagaagaagaagaagaagaagaagaagaagaagaagaagaagaagaagaagaagaagaagaagaagaagaagaagaagaagaagaagaagaagaagaagaagaagaagaagaagaagaagaagaagaagaagaagaagaagaagaagaagaagaagaagaagaagaagaagaagaagaagaagaagaagaagaagaagaagaagaagaagaagaagaagaagaagaagaagaagaagaagaagaagaagaagaagaagaagaagaagaagaagaagaagaagaagaagaagaagaagaagaagaagaagaagaagaagaagaagaagaagaagaagaagaagaagaagaagaagaagaagaagaagaagaagaagaagaagaagaagaagaagaagaagaagaagaagaagaagaagaagaagaagaagaagaagaagaagaagaagaagaagaagaagaagaagaagaagaagaagaagaagaagaagaagaagaagaagaagaagaagaagaagaagaagaagaagaagaagaagaagaagaagaagaagaagaagaagaagaagaagaagaagaagaagaagaagaagaagaagaagaagaagaagaagaagaagaagaagaagaagaagaagaagaagaagaagaagaagaagaagaagaagaagaagaagaagaagaagaagaagaagaagaagaagaagaagaagaagaagaagaagaagaagaagaagaagaagaagaagaagaagaagaagaagaagaagaagaagaagaagaagaagaagaagaagaagaagaagaagaagaagaagaagaagaagaagaagaagaagaagaagaagaagaagaagaagaagaagaagaagaagaagaagaagaagaagaagaagaagaagaagaagaagaagaagaagaagaagaagaagaagaagaagaagaagaagaagaagaagaagaagaagaagaagaagaagaagaagaagaagaagaagaagaagaagaagaagaagaagaagaagaagaagaagaagaagaagaagaagaagaagaagaagaagaagaagaagaagaagaagaagaagaagaagaagaagaagaagaagaagaagaagaagaagaagaagaagaagaagaagaagaagaagaagaagaagaagaagaagaagaagaagaagaagaagaagaagaagaagaagaagaagaagaagaagaagaagaagaagaagaagaagaagaagaagaagaagaagaagaagaagaagaagaagaagaagaagaagaagaagaagaagaagaagaagaagaagaagaagaagaagaagaagaagaagaagaagaagaagaagaagaagaagaagaagaagaagaagaagaagaagaagaagaagaagaagaagaagaagaagaagaagaagaagaagaagaagaagaagaagaagaagaagaagaagaagaagaagaagaagaagaagaagaagaagaagaagaagaagaagaagaagaagaagaagaagaagaagaagaagaagaagaagaagaagaagaagaagaagaagaagaagaagaagaagaagaagaagaagaagaagaagaagaagaagaagaagaagaagaagaagaagaagaagaagaagaagaagaagaagaagaagaagaagaagaagaagaagaagaagaagaagaagaagaagaagaagaagaagaagaagaagaagaagaagaagaagaagaagaagaagaagaagaagaagaagaagaagaagaagaagaagaagaagaagaagaagaagaagaagaagaagaagaagaagaagaagaagaagaagaagaagaagaagaagaagaagaagaagaagaagaagaagaagaagaagaagaagaagaagaagaagaagaagaagaagaagaagaagaagaagaagaagaagaagaagaagaagaagaagaagaagaagaagaagaagaagaagaagaagaagaagaagaagaagaagaagaagaagaagaagaagaagaagaagaagaagaagaagaagaagaagaagaagaagaagaagaagaagaagaagaagaagaagaagaagaagaagaagaagaagaagaagaagaagaagaagaagaagaagaagaagaagaagaagaagaagaagaagaagaagaagaagaagaagaagaagaagaagaagaagaagaagaagaagaagaagaagaagaagaagaagaagaagaagaagaagaagaagaagaagaagaagaagaagaagaagaagaagaagaagaagaagaagaagaagaagaagaagaagaagaagaagaagaagaagaagaagaagaagaagaagaagaagaagaagaagaagaagaagaagaagaagaagaagaagaagaagaagaagaagaagaagaagaagaagaagaagaagaagaagaagaagaagaagaagaagaagaagaagaagaagaagaagaagaagaagaagaagaagaagaagaagaagaagaagaagaagaagaagaagaagaagaagaagaagaagaagaagaagaagaagaagaagaagaagaagaagaagaagaagaagaagaagaagaagaagaagaagaagaagaagaagaagaagaagaagaagaagaagaagaagaagaagaagaagaagaagaagaagaagaagaagaagaagaagaagaagaagaagaagaagaagaagaagaa

SEQ ID NO: 2573 - DNA, 3600 bp, Homo sapiens
  source 1..3600: mol_type = genomic DNA
  misc_feature 1..3600: note = This sequence may encompass 600-1200 GAA repeats
gaagaagaagaagaagaagaagaagaagaagaagaagaagaagaagaagaagaagaagaagaagaagaagaagaagaagaagaagaagaagaagaagaagaagaagaagaagaagaagaagaagaagaagaagaagaagaagaagaagaagaagaagaagaagaagaagaagaagaagaagaagaagaagaagaagaagaagaagaagaagaagaagaagaagaagaagaagaagaagaagaagaagaagaagaagaagaagaagaagaagaagaagaagaagaagaagaagaagaagaagaagaagaagaagaagaagaagaagaagaagaagaagaagaagaagaagaagaagaagaagaagaagaagaagaagaagaagaagaagaagaagaagaagaagaagaagaagaagaagaagaagaagaagaagaagaagaagaagaagaagaagaagaagaagaagaagaagaagaagaagaagaagaagaagaagaagaagaagaagaagaagaagaagaagaagaagaagaagaagaagaagaagaagaagaagaagaagaagaagaagaagaagaagaagaagaagaagaagaagaagaagaagaagaagaagaagaagaagaagaagaagaagaagaagaagaagaagaagaagaagaagaagaagaagaagaagaagaagaagaagaagaagaagaagaagaagaagaagaagaagaagaagaagaagaagaagaagaagaagaagaagaagaagaagaagaagaagaagaagaagaagaagaagaagaagaagaagaagaagaagaagaagaagaagaagaagaagaagaagaagaagaagaagaagaagaagaagaagaagaagaagaagaagaagaagaagaagaagaagaagaagaagaagaagaagaagaagaagaagaagaagaagaagaagaagaagaagaagaagaagaagaagaagaagaagaagaagaagaagaagaagaagaagaagaagaagaagaagaagaagaagaagaagaagaagaagaagaagaagaagaagaagaagaagaagaagaagaagaagaagaagaagaagaagaagaagaagaagaagaagaagaagaagaagaagaagaagaagaagaagaagaagaagaagaagaagaagaagaagaagaagaagaagaagaagaagaagaagaagaagaagaagaagaagaagaagaagaagaagaagaagaagaagaagaagaagaagaagaagaagaagaagaagaagaagaagaagaagaagaagaagaagaagaagaagaagaagaagaagaagaagaagaagaagaagaagaagaagaagaagaagaagaagaagaagaagaagaagaagaagaagaagaagaagaagaagaagaagaagaagaagaagaagaagaagaagaagaagaagaagaagaagaagaagaagaagaagaagaagaagaagaagaagaagaagaagaagaagaagaagaagaagaagaagaagaagaagaagaagaagaagaagaagaagaagaagaagaagaagaagaagaagaagaagaagaagaagaagaagaagaagaagaagaagaagaagaagaagaagaagaagaagaagaagaagaagaagaagaagaagaagaagaagaagaagaagaagaagaagaagaagaagaagaagaagaagaagaagaagaagaagaagaagaagaagaagaagaagaagaagaagaagaagaagaagaagaagaagaagaagaagaagaagaagaagaagaagaagaagaagaagaagaagaagaagaagaagaagaagaagaagaagaagaagaagaagaagaagaagaagaagaagaagaagaagaagaagaagaagaagaagaagaagaagaagaagaagaagaagaagaagaagaagaagaagaagaagaagaagaagaagaagaagaagaagaagaagaagaagaagaagaagaagaagaagaagaagaagaagaagaagaagaagaagaagaagaagaagaagaagaagaagaagaagaagaagaagaagaagaagaagaagaagaagaagaagaagaagaagaagaagaagaagaagaagaagaagaagaagaagaagaagaagaagaagaagaagaagaagaagaagaagaagaagaagaagaagaagaagaagaagaagaagaagaagaagaagaagaagaagaagaagaagaagaagaagaagaagaagaagaagaagaagaagaagaagaagaagaagaagaagaagaagaagaagaagaagaagaagaagaagaagaagaagaagaagaagaagaagaagaagaagaagaagaagaagaagaagaagaagaagaagaagaagaagaagaagaagaagaagaagaagaagaagaagaagaagaagaagaagaagaagaagaagaagaagaagaagaagaagaagaagaagaagaagaagaagaagaagaagaagaagaagaagaagaagaagaagaagaagaagaagaagaagaagaagaagaagaagaagaagaagaagaagaagaagaagaagaagaagaagaagaagaagaagaagaagaagaagaagaagaagaagaagaagaagaagaagaagaagaagaagaagaagaagaagaagaagaagaagaagaagaagaagaagaagaagaagaagaagaagaagaagaagaagaagaagaagaagaagaagaagaagaagaagaagaagaagaagaagaagaagaagaagaagaagaagaagaagaagaagaagaagaagaagaagaagaagaagaagaagaagaagaagaagaagaagaagaagaagaagaagaagaagaagaagaagaagaagaagaagaagaagaagaagaagaagaagaagaagaagaagaagaagaagaagaagaagaagaagaagaagaagaagaagaagaagaagaagaagaagaagaagaagaagaagaagaagaagaagaagaagaagaagaagaagaagaagaagaagaagaagaagaagaagaagaagaagaagaagaagaagaagaagaagaagaagaagaagaagaagaagaagaagaagaagaagaagaagaagaagaagaagaagaagaagaagaagaagaagaagaagaagaagaagaagaagaagaagaagaagaagaagaagaagaagaagaagaagaagaagaagaagaagaagaagaagaagaagaagaagaagaagaagaagaagaagaagaagaagaagaagaagaagaagaagaagaagaagaagaagaagaagaagaagaagaagaagaagaagaagaagaagaagaagaagaagaagaagaagaagaagaagaagaagaagaagaagaagaagaagaagaagaagaagaagaagaagaagaagaagaagaagaagaagaagaagaagaagaagaagaagaagaagaagaagaagaagaagaagaagaagaagaagaagaagaagaagaagaagaagaagaagaagaagaagaagaagaagaagaagaagaagaagaagaagaagaagaagaagaagaagaagaagaagaagaagaagaagaa

SEQ ID NO: 2574 - DNA, 3900 bp, Homo sapiens; identical to SEQ ID NO: 2572
  source 1..3900: mol_type = genomic DNA
  misc_feature 1..3900: note = This sequence may encompass 90-1300 GAA repeats

SEQ ID NO: 2575 - DNA, 198 bp, Homo sapiens
  source 1..198: mol_type = genomic DNA
  misc_feature 1..198: note = This sequence may encompass 44-66 GAA repeats
gaagaagaagaagaagaagaagaagaagaagaagaagaagaagaagaagaagaagaagaagaagaagaagaagaagaagaagaagaagaagaagaagaagaagaagaagaagaagaagaagaagaagaagaagaagaagaagaagaagaagaagaagaagaagaagaagaagaagaagaagaagaagaagaagaagaa

SEQ ID NO: 2576 - RNA, 90 nt, synthetic construct
  source 1..90: mol_type = other RNA
gaagaagaagaagaagaagaagaagaagaagaagaagaagaagaagaagaagaagaagaagaagaagaagaagaagaagaagaagaagaa

SEQ ID NO: 2577 - RNA, 60 nt, synthetic construct
  source 1..60: mol_type = other RNA
gaagaagaagaagaagaagaagaagaagaagaagaagaagaagaagaagaagaagaagaa

SEQ ID NO: 2578 - RNA, 30 nt, synthetic construct
  source 1..30: mol_type = other RNA
gaagaagaagaagaagaagaagaagaagaa

SEQ ID NO: 2579 - RNA, 15 nt, synthetic construct
  source 1..15: mol_type = other RNA
gaagaagaagaagaa

SEQ ID NO: 2580 - RNA, 99 nt, synthetic construct
  source 1..99: mol_type = other RNA
gaagaagaagaagaagaagaagaagaagaagaagaagaagaagaagaagaagaagaagaagaagaagaagaagaagaagaagaagaagaagaagaagaa

SEQ ID NO: 2581 - RNA, 36 nt, synthetic construct
  source 1..36: mol_type = other RNA
gaagaagaagaagaagaagaagaagaagaagaagaa

SEQ ID NO: 2582 - DNA, 195 bp, Homo sapiens
  source 1..195: mol_type = other DNA
  misc_feature 1..195: note = This sequence may encompass 34-65 GAA repeats
gaagaagaagaagaagaagaagaagaagaagaagaagaagaagaagaagaagaagaagaagaagaagaagaagaagaagaagaagaagaagaagaagaagaagaagaagaagaagaagaagaagaagaagaagaagaagaagaagaagaagaagaagaagaagaagaagaagaagaagaagaagaagaagaagaa

SEQ ID NO: 2583 - DNA, 195 bp, Homo sapiens; identical to SEQ ID NO: 2582
  source 1..195: mol_type = other DNA
  misc_feature 1..195: note = This sequence may encompass 44-65 GAA repeats

SEQ ID NO: 2584 - protein, 9 aa, synthetic construct
RRRRRRRRR

SEQ ID NO: 2585 - protein, 8 aa, synthetic construct
RRRRRRRR

SEQ ID NO: 2586 - RNA, 99 nt, synthetic construct; identical to SEQ ID NO: 2580
  source 1..99: mol_type = other RNA
  misc_feature 1..99: note = This sequence may encompass 0-33 GAA repeats

SEQ ID NO: 2587 - RNA, 99 nt, synthetic construct
  source 1..99: mol_type = other RNA
  misc_feature 1..99: note = This sequence may encompass 0-33 UUC repeats
ttcttcttcttcttcttcttcttcttcttcttcttcttcttcttcttcttcttcttcttcttcttcttcttcttcttcttcttcttcttcttcttcttc

SEQ ID NO: 2588 - DNA, 99 bp, synthetic construct
  source 1..99: mol_type = other DNA
  misc_feature 1..99: note = This sequence may encompass 0-33 TTC repeats
ttcttcttcttcttcttcttcttcttcttcttcttcttcttcttcttcttcttcttcttcttcttcttcttcttcttcttcttcttcttcttcttcttc

SEQ ID NO: 2589 - DNA, 18 bp, Homo sapiens
  source 1..18: mol_type = genomic DNA
gaagaagaagaagaagaa

SEQ ID NO: 2590 - DNA, 1623 bp, Homo sapiens
  source 1..1623: mol_type = genomic DNA
gaagaagaagaagaagaagaagaagaagaagaagaagaagaagaagaagaagaagaagaagaagaagaagaagaagaagaagaagaagaagaagaagaagaagaagaagaagaagaagaagaagaagaagaagaagaagaagaagaagaagaagaagaagaagaagaagaagaagaagaagaagaagaagaagaagaagaagaagaagaagaagaagaagaagaagaagaagaagaagaagaagaagaagaagaagaagaagaagaagaagaagaagaagaagaagaagaagaagaagaagaagaagaagaagaagaagaagaagaagaagaagaagaagaagaagaagaagaagaagaagaagaagaagaagaagaagaagaagaagaagaagaagaagaagaagaagaagaagaagaagaagaagaagaagaagaagaagaagaagaagaagaagaagaagaagaagaagaagaagaagaagaagaagaagaagaagaagaagaagaagaagaagaagaagaagaagaagaagaagaagaagaagaagaagaagaagaagaagaagaagaagaagaagaagaagaagaagaagaagaagaagaagaagaagaagaagaagaagaagaagaagaagaagaagaagaagaagaagaagaagaagaagaagaagaagaagaagaagaagaagaagaagaagaagaagaagaagaagaagaagaagaagaagaagaagaagaagaagaagaagaagaagaagaagaagaagaagaagaagaagaagaagaagaagaagaagaagaagaagaagaagaagaagaagaagaagaagaagaagaagaagaagaagaagaagaagaagaagaagaagaagaagaagaagaagaagaagaagaagaagaagaagaagaagaagaagaagaagaagaagaagaagaagaagaagaagaagaagaagaagaagaagaagaagaagaagaagaagaagaagaagaagaagaagaagaagaagaagaagaagaagaagaagaagaagaagaagaagaagaagaagaagaagaagaagaagaagaagaagaagaagaagaagaagaagaagaagaagaagaagaagaagaagaagaagaagaagaagaagaagaagaagaagaagaagaagaagaagaagaagaagaagaagaagaagaagaagaagaagaagaagaagaagaagaagaagaagaagaagaagaagaagaagaagaagaagaagaagaagaagaagaagaagaagaagaagaagaagaagaagaagaagaagaagaagaagaagaagaagaagaagaagaagaagaagaagaagaagaagaagaagaagaagaagaagaagaagaagaagaagaagaagaagaagaagaagaagaagaagaagaagaagaagaagaagaagaagaagaagaagaagaagaagaagaagaagaagaagaagaagaagaagaagaagaagaagaagaagaagaagaagaagaagaagaagaagaagaagaagaagaagaagaagaagaagaagaagaagaagaagaagaagaagaagaagaagaagaagaagaagaagaagaagaagaagaagaagaagaagaagaa

SEQ ID NO: 2591 - DNA, 1260 bp, Homo sapiens
  source 1..1260: mol_type = genomic DNA
gaagaagaagaagaagaagaagaagaagaagaagaagaagaagaagaagaagaagaagaagaagaagaagaagaagaagaagaagaagaagaagaagaagaagaagaagaagaagaagaagaagaagaagaagaagaagaagaagaagaagaagaagaagaagaagaagaagaagaagaagaagaagaagaagaagaagaagaagaagaagaagaagaagaagaagaagaagaagaagaagaagaagaagaagaagaagaagaagaagaagaagaagaagaagaagaagaagaagaagaagaagaagaagaagaagaagaagaagaagaagaagaagaagaagaagaagaagaagaagaagaagaagaagaagaagaagaagaagaagaagaagaagaagaagaagaagaagaagaagaagaagaagaagaagaagaagaagaagaagaagaagaagaagaagaagaagaagaagaagaagaagaagaagaagaagaagaagaagaagaagaagaagaagaagaagaagaagaagaagaagaagaagaagaagaagaagaagaagaagaagaagaagaagaagaagaagaagaagaagaagaagaagaagaagaagaagaagaagaagaagaagaagaagaagaagaagaagaagaagaagaagaagaagaagaagaagaagaagaagaagaagaagaagaagaagaagaagaagaagaagaagaagaagaagaagaagaagaagaagaagaagaagaagaagaagaagaagaagaagaagaagaagaagaagaagaagaagaagaagaagaagaagaagaagaagaagaagaagaagaagaagaagaagaagaagaagaagaagaagaagaagaagaagaagaagaagaagaagaagaagaagaagaagaagaagaagaagaagaagaagaagaagaagaagaagaagaagaagaagaagaagaagaagaagaagaagaagaagaagaagaagaagaagaagaagaagaagaagaagaagaagaagaagaagaagaagaagaagaagaagaagaagaagaagaagaagaagaagaagaagaagaagaagaagaagaagaagaagaagaagaagaagaagaagaagaagaagaagaagaagaagaagaagaagaagaagaagaagaagaagaagaagaagaagaagaagaagaagaagaagaagaagaagaagaagaagaagaagaagaagaagaagaagaagaagaagaagaagaagaa

SEQ ID NO: 2592 - DNA, 1140 bp, Homo sapiens
  source 1..1140: mol_type = genomic DNA
gaagaagaagaagaagaagaagaagaagaagaagaagaagaagaagaagaagaagaagaagaagaagaagaagaagaagaagaagaagaagaagaagaagaagaagaagaagaagaagaagaagaagaagaagaagaagaagaagaagaagaagaagaagaagaagaagaagaagaagaagaagaagaagaagaagaagaagaagaagaagaagaagaagaagaagaagaagaagaagaagaagaagaagaagaagaagaagaagaagaagaagaagaagaagaagaagaagaagaagaagaagaagaagaagaagaagaagaagaagaagaagaagaagaagaagaagaagaagaagaagaagaagaagaagaagaagaagaagaagaagaagaagaagaagaagaagaagaagaagaagaagaagaagaagaagaagaagaagaagaagaagaagaagaagaagaagaagaagaagaagaagaagaagaagaagaagaagaagaagaagaagaagaagaagaagaagaagaagaagaagaagaagaagaagaagaagaagaagaagaagaagaagaagaagaagaagaagaagaagaagaagaagaagaagaagaagaagaagaagaagaagaagaagaagaagaagaagaagaagaagaagaagaagaagaagaagaagaagaagaagaagaagaagaagaagaagaagaagaagaagaagaagaagaagaagaagaagaagaagaagaagaagaagaagaagaagaagaagaagaagaagaagaagaagaagaagaagaagaagaagaagaagaagaagaagaagaagaagaagaagaagaagaagaagaagaagaagaagaagaagaagaagaagaagaagaagaagaagaagaagaagaagaagaagaagaagaagaagaagaagaagaagaagaagaagaagaagaagaagaagaagaagaagaagaagaagaagaagaagaagaagaagaagaagaagaagaagaagaagaagaagaagaagaagaagaagaagaagaagaagaagaagaagaagaagaagaagaagaagaagaagaagaagaagaagaagaagaagaagaagaagaagaagaagaagaagaagaagaagaa

SEQ ID NO: 2593 - DNA, 990 bp, Homo sapiens
  source 1..990: mol_type = genomic DNA
gaagaagaagaagaagaagaagaagaagaagaagaagaagaagaagaagaagaagaagaagaagaagaagaagaagaagaagaagaagaagaagaagaagaagaagaagaagaagaagaagaagaagaagaagaagaagaagaagaagaagaagaagaagaagaagaagaagaagaagaagaagaagaagaagaagaagaagaagaagaagaagaagaagaagaagaagaagaagaagaagaagaagaagaagaagaagaagaagaagaagaagaagaagaagaagaagaagaagaagaagaagaagaagaagaagaagaagaagaagaagaagaagaagaagaagaagaagaagaagaagaagaagaagaagaagaagaagaagaagaagaagaagaagaagaagaagaagaagaagaagaagaagaagaagaagaagaagaagaagaagaagaagaagaagaagaagaagaagaagaagaagaagaagaagaagaagaagaagaagaagaagaagaagaagaagaagaagaagaagaagaagaagaagaagaagaagaagaagaagaagaagaagaagaagaagaagaagaagaagaagaagaagaagaagaagaagaagaagaagaagaagaagaagaagaagaagaagaagaagaagaagaagaagaagaagaagaagaagaagaagaagaagaagaagaagaagaagaagaagaagaagaagaagaagaagaagaagaagaagaagaagaagaagaagaagaagaagaagaagaagaagaagaagaagaagaagaagaagaagaagaagaagaagaagaagaagaagaagaagaagaagaagaagaagaagaagaagaagaagaagaagaagaagaagaagaagaagaagaagaagaagaagaagaagaagaagaagaagaagaagaagaagaagaagaagaagaagaagaagaagaagaagaagaagaagaagaagaagaagaa

SEQ ID NO: 2594 - DNA, 66 bp, Homo sapiens
  source 1..66: mol_type = genomic DNA
  misc_feature 1..66: note = This sequence may encompass 7-22 GAA repeats
gaagaagaagaagaagaagaagaagaagaagaagaagaagaagaagaagaagaagaagaagaagaa

SEQ ID NO: 2595 - DNA, 5100 bp, Homo sapiens
  source 1..5100: mol_type = genomic DNA
  misc_feature 1..5100: note = This sequence may encompass 70-1700 GAA repeats
gaagaagaagaagaagaagaagaagaagaagaagaagaagaagaagaagaagaagaagaagaagaagaagaagaagaagaagaagaagaagaagaagaagaagaagaagaagaagaagaagaagaagaagaagaagaagaagaagaagaagaagaagaagaagaagaagaagaagaagaagaagaagaagaagaagaagaagaagaagaagaagaagaagaagaagaagaagaagaagaagaagaagaagaagaagaagaagaagaagaagaagaagaagaagaagaagaagaagaagaagaagaagaagaagaagaagaagaagaagaagaagaagaagaagaagaagaagaagaagaagaagaagaagaagaagaagaagaagaagaagaagaagaagaagaagaagaagaagaagaagaagaagaagaagaagaagaagaagaagaagaagaagaagaagaagaagaagaagaagaagaagaagaagaagaagaagaagaagaagaagaagaagaagaagaagaagaagaagaagaagaagaagaagaagaagaagaagaagaagaagaagaagaagaagaagaagaagaagaagaagaagaagaagaagaagaagaagaagaagaagaagaagaagaagaagaagaagaagaagaagaagaagaagaagaagaagaagaagaagaagaagaagaagaagaagaagaagaagaagaagaagaagaagaagaagaagaagaagaagaagaagaagaagaagaagaagaagaagaagaagaagaagaagaagaagaagaagaagaagaagaagaagaagaagaagaagaagaagaagaagaagaagaagaagaagaagaagaagaagaagaagaagaagaagaagaagaagaagaagaagaagaagaagaagaagaagaagaagaagaagaagaagaagaagaagaagaagaagaagaagaagaagaagaagaagaagaagaagaagaagaagaagaagaagaagaagaagaagaagaagaagaagaagaagaagaagaagaagaagaagaagaagaagaagaagaagaagaagaagaagaagaagaagaagaagaagaagaagaagaagaagaagaagaagaagaagaagaagaagaagaagaagaagaagaagaagaagaagaagaagaagaagaagaagaagaagaagaagaagaagaagaagaagaagaagaagaagaagaagaagaagaagaagaagaagaagaagaagaagaagaagaagaagaagaagaagaagaagaagaagaagaagaagaagaagaagaagaagaagaagaagaagaagaagaagaagaagaagaagaagaagaagaagaagaagaagaagaagaagaagaagaagaagaagaagaagaagaagaagaagaagaagaagaagaagaagaagaagaagaagaagaagaagaagaagaagaagaagaagaagaagaagaagaagaagaagaagaagaagaagaagaagaagaagaagaagaagaagaagaagaagaagaagaagaagaagaagaagaagaagaagaagaagaagaagaagaagaagaagaagaagaagaagaagaagaagaagaagaagaagaagaagaagaagaagaagaagaagaagaagaagaagaagaagaagaagaagaagaagaagaagaagaagaagaagaagaagaagaagaagaagaagaagaagaagaagaagaagaagaagaagaagaagaagaagaagaagaagaagaagaagaagaagaagaagaagaagaagaagaagaagaagaagaagaagaagaagaagaagaagaagaagaagaagaagaagaagaagaagaagaagaagaagaagaagaagaagaagaagaagaagaagaagaagaagaagaagaagaagaagaagaagaagaagaagaagaagaagaagaagaagaagaagaagaagaagaagaagaagaagaagaagaagaagaagaagaagaagaagaagaagaagaagaagaagaagaagaagaagaagaagaagaagaagaagaagaagaagaagaagaagaagaagaagaagaagaagaagaagaagaagaagaagaagaagaagaagaagaagaagaagaagaagaagaagaagaagaagaagaagaagaagaagaagaagaagaagaagaagaagaagaagaagaagaagaagaagaagaagaagaagaagaagaagaagaagaagaagaagaagaagaagaagaagaagaagaagaagaagaagaagaagaagaagaagaagaagaagaagaagaagaagaagaagaagaagaagaagaagaagaagaagaagaagaagaagaagaagaagaagaagaagaagaagaagaagaagaagaagaagaagaagaagaagaagaagaagaagaagaagaagaagaagaagaagaagaagaagaagaagaagaagaagaagaagaagaagaagaagaagaagaagaagaagaagaagaagaagaagaagaagaagaagaagaagaagaagaagaagaagaagaagaagaagaagaagaagaagaagaagaagaagaagaagaagaagaagaagaagaagaagaagaagaagaagaagaagaagaagaagaagaagaagaagaagaagaagaagaagaagaagaagaagaagaagaagaagaagaagaagaagaagaagaagaagaagaagaagaagaagaagaagaagaagaagaagaagaagaagaagaagaagaagaagaagaagaagaagaagaagaagaagaagaagaagaagaagaagaagaagaagaagaagaagaagaagaagaagaagaagaagaagaagaagaagaagaagaagaagaagaagaagaagaagaagaagaagaagaagaagaagaagaagaagaagaagaagaagaagaagaagaagaagaagaagaagaagaagaagaagaagaagaagaagaagaagaagaagaagaagaagaagaagaagaagaagaagaagaagaagaagaagaagaagaagaagaagaagaagaagaagaagaagaagaagaagaagaagaagaagaagaagaagaagaagaagaagaagaagaagaagaagaagaagaagaagaagaagaagaagaagaagaagaagaagaagaagaagaagaagaagaagaagaagaagaagaagaagaagaagaagaagaagaagaagaagaagaagaagaagaagaagaagaagaagaagaagaagaagaagaagaagaagaagaagaagaagaagaagaagaagaagaagaagaagaagaagaagaagaagaagaagaagaagaagaagaagaagaagaagaagaagaagaagaagaagaagaagaagaagaagaagaagaagaagaagaagaagaagaagaagaagaagaagaagaagaagaagaagaagaagaagaagaagaagaagaagaagaagaagaagaagaagaagaagaagaagaagaagaagaagaagaagaagaagaagaagaagaagaagaagaagaagaagaagaagaagaagaagaagaagaagaagaagaagaagaagaagaagaagaagaagaagaagaagaagaagaagaagaagaagaagaagaagaagaagaagaagaagaagaagaagaagaagaagaagaagaagaagaagaagaagaagaagaagaagaagaagaagaagaagaagaagaagaagaagaagaagaagaagaagaagaagaagaagaagaagaagaagaagaagaagaagaagaagaagaagaagaagaagaagaagaagaagaagaagaagaagaagaagaagaagaagaagaagaagaagaagaagaagaagaagaagaagaagaagaagaagaagaagaagaagaagaagaagaagaagaagaagaagaagaagaagaagaagaagaagaagaagaagaagaagaagaagaagaagaagaagaagaagaagaagaagaagaagaagaagaagaagaagaagaagaagaagaagaagaagaagaagaagaagaagaagaagaagaagaagaagaagaagaagaagaagaagaagaagaagaagaagaagaagaagaagaagaagaagaagaagaagaagaagaagaagaagaagaagaagaagaagaagaagaagaagaagaagaagaagaagaagaagaagaagaagaagaagaagaagaagaagaagaagaagaagaagaagaagaagaagaagaagaagaagaagaagaagaagaagaagaagaagaagaagaagaagaagaagaagaagaagaagaagaagaagaagaagaagaagaagaagaagaagaagaagaagaagaagaagaagaagaagaagaagaagaagaagaagaagaagaagaagaagaagaagaagaagaagaagaagaagaagaagaagaagaagaagaagaagaagaagaagaagaagaagaagaagaagaagaagaagaagaagaagaagaagaagaagaagaagaagaagaagaagaagaagaagaagaagaagaagaagaagaagaagaagaagaagaagaagaagaagaagaagaagaagaagaagaagaagaagaagaagaagaagaagaagaagaagaagaagaagaagaagaagaagaagaagaagaagaagaagaagaagaagaagaagaagaagaagaagaagaagaagaagaagaagaagaagaagaagaagaagaagaagaagaagaagaagaagaagaagaagaagaagaagaagaagaagaagaagaagaagaagaagaagaagaagaagaagaagaagaagaagaagaagaagaagaagaagaagaagaagaagaagaagaagaagaagaagaagaagaagaagaagaagaagaagaagaagaagaagaagaagaagaagaagaagaagaagaagaagaagaagaagaagaagaagaagaagaagaagaagaagaagaagaagaagaagaagaagaagaagaagaagaagaagaagaagaagaagaagaagaagaagaagaagaagaagaagaagaagaagaagaagaagaagaagaagaagaagaa

SEQ ID NO: 2596 - DNA, 99 bp, Homo sapiens; identical to SEQ ID NO: 2569
  source 1..99: mol_type = genomic DNA
  misc_feature 1..99: note = This sequence may encompass 5-33 GAA repeats

SEQ ID NO: 2597 - DNA, 3000 bp, Homo sapiens
  source 1..3000: mol_type = genomic DNA
  misc_feature 1..3000: note = This sequence may encompass 50-1000 GAA repeats
gaagaagaagaagaagaagaagaagaagaagaagaagaagaagaagaagaagaagaagaagaagaagaagaagaagaagaagaagaagaagaagaagaagaagaagaagaagaagaagaagaagaagaagaagaagaagaagaagaagaagaagaagaagaagaagaagaagaagaagaagaagaagaagaagaagaagaagaagaagaagaagaagaagaagaagaagaagaagaagaagaagaagaagaagaagaagaagaagaagaagaagaagaagaagaagaagaagaagaagaagaagaagaagaagaagaagaagaagaagaagaagaagaagaagaagaagaagaagaagaagaagaagaagaagaagaagaagaagaagaagaagaagaagaagaagaagaagaagaagaagaagaagaagaagaagaagaagaagaagaagaagaagaagaagaagaagaagaagaagaagaagaagaagaagaagaagaagaagaagaagaagaagaagaagaagaagaagaagaagaagaagaagaagaagaagaagaagaagaagaagaagaagaagaagaagaagaagaagaagaagaagaagaagaagaagaagaagaagaagaagaagaagaagaagaagaagaagaagaagaagaagaagaagaagaagaagaagaagaagaagaagaagaagaagaagaagaagaagaagaagaagaagaagaagaagaagaagaagaagaagaagaagaagaagaagaagaagaagaagaagaagaagaagaagaagaagaagaagaagaagaagaagaagaagaagaagaagaagaagaagaagaagaagaagaagaagaagaagaagaagaagaagaagaagaagaagaagaagaagaagaagaagaagaagaagaagaagaagaagaagaagaagaagaagaagaagaagaagaagaagaagaagaagaagaagaagaagaagaagaagaagaagaagaagaagaagaagaagaagaagaagaagaagaagaagaagaagaagaagaagaagaagaagaagaagaagaagaagaagaagaagaagaagaagaagaagaagaagaagaagaagaagaagaagaagaagaagaagaagaagaagaagaagaagaagaagaagaagaagaagaagaagaagaagaagaagaagaagaagaagaagaagaagaagaagaagaagaagaagaagaagaagaagaagaagaagaagaagaagaagaagaagaagaagaagaagaagaagaagaagaagaagaagaagaagaagaagaagaagaagaagaagaagaagaagaagaagaagaagaagaagaagaagaagaagaagaagaagaagaagaagaagaagaagaagaagaagaagaagaagaagaagaagaagaagaagaagaagaagaagaagaagaagaagaagaagaagaagaagaagaagaagaagaagaagaagaagaagaagaagaagaagaagaagaagaagaagaagaagaagaagaagaagaagaagaagaagaagaagaagaagaagaagaagaagaagaagaagaagaagaagaagaagaagaagaagaagaagaagaagaagaagaagaagaagaagaagaagaagaagaagaagaagaagaagaagaagaagaagaagaagaagaagaagaagaagaagaagaagaagaagaagaagaagaagaagaagaagaagaagaagaagaagaagaagaagaagaagaagaagaagaagaagaagaagaagaagaagaagaagaagaagaagaagaagaagaagaagaagaagaagaagaagaagaagaagaagaagaagaagaagaagaagaagaagaagaagaagaagaagaagaagaagaagaagaagaagaagaagaagaagaagaagaagaagaagaagaagaagaagaagaagaagaagaagaagaagaagaagaagaagaagaagaagaagaagaagaagaagaagaagaagaagaagaagaagaagaagaagaagaagaagaagaagaagaagaagaagaagaagaagaagaagaagaagaagaagaagaagaagaagaagaagaagaagaagaagaagaagaagaagaagaagaagaagaagaagaagaagaagaagaagaagaagaagaagaagaagaagaagaagaagaagaagaagaagaagaagaagaagaagaagaagaagaagaagaagaagaagaagaagaagaagaagaagaagaagaagaagaagaagaagaagaagaagaagaagaagaagaagaagaagaagaagaagaagaagaagaagaagaagaagaagaagaagaagaagaagaagaagaagaagaagaagaagaagaagaagaagaagaagaagaagaagaagaagaagaagaagaagaagaagaagaagaagaagaagaagaagaagaagaagaagaagaagaagaagaagaagaagaagaagaagaagaagaagaagaagaagaagaagaagaagaagaagaagaagaagaagaagaagaagaagaagaagaagaagaagaagaagaagaagaagaagaagaagaagaagaagaagaagaagaagaagaagaagaagaagaagaagaagaagaagaagaagaagaagaagaagaagaagaagaagaagaagaagaagaagaagaagaagaagaagaagaagaagaagaagaagaagaagaagaagaagaagaagaagaagaagaagaagaagaagaagaagaagaagaagaagaagaagaagaagaagaagaagaagaagaagaagaagaagaagaagaagaagaagaagaagaagaagaagaagaagaagaagaagaagaagaagaagaagaagaagaagaagaagaagaagaagaagaagaagaagaagaagaagaagaagaagaagaagaagaagaagaagaagaagaagaagaagaagaagaagaagaagaagaagaagaa

SEQ ID NO: 2598 - DNA, 450 bp, Homo sapiens
  source 1..450: mol_type = genomic DNA
  misc_feature 1..450: note = This sequence may encompass 50-150 GAA repeats
gaagaagaagaagaagaagaagaagaagaagaagaagaagaagaagaagaagaagaagaagaagaagaagaagaagaagaagaagaagaagaagaagaagaagaagaagaagaagaagaagaagaagaagaagaagaagaagaagaagaagaagaagaagaagaagaagaagaagaagaagaagaagaagaagaagaagaagaagaagaagaagaagaagaagaagaagaagaagaagaagaagaagaagaagaagaagaagaagaagaagaagaagaagaagaagaagaagaagaagaagaagaagaagaagaagaagaagaagaagaagaagaagaagaagaagaagaagaagaagaagaagaagaagaagaagaagaagaagaagaagaagaagaagaagaagaagaagaagaagaagaagaagaagaagaagaagaagaagaagaa

What is claimed is:

1. A prime editing composition comprising (A) a first prime editing guide RNA (PEgRNA) or one or more polynucleotides encoding the first PEgRNA and (B) a second PEgRNA or one or more polynucleotides encoding the second PEgRNA,
wherein the first PEgRNA comprises:
(i) a first spacer that is complementary to a first search target sequence on a first strand of a FXN gene,
(ii) a first gRNA core capable of binding to a Cas9 protein; and
(iii) a first extension arm comprising a first editing template and a first primer binding site (PBS),
wherein the first spacer comprises at its 3′ end nucleotides 4-20 of a sequence selected from the group consisting of SEQ ID NOs: 1, 101, 234, 331, 362, 391, 422, and 452, and wherein the first PBS comprises at its 5′ end a sequence that is the reverse complement of nucleotides 13-17 of the selected sequence;
wherein the second PEgRNA comprises:
(i) a second spacer that is complementary to a second search target sequence on a second strand of the FXN gene complementary to the first strand,
(ii) a second gRNA core capable of binding to a Cas9 protein; and
(iii) a second extension arm comprising a second editing template and a second PBS,
wherein the second spacer comprises at its 3′ end nucleotides 4-20 of a sequence selected from the group consisting of SEQ ID NOs: 482, 511, 542, 571, 600, 631, 740, 767, 796, 823, 852, 881, 910, 937, 966, 990, 1017, 1132, 1159, 1186, 1215, 1324, 1351, 1380, 1405, 1430, 1455, 1480, 1505, 1528, 1553, 1578, 1603, 1628, 1653, 1678, 1703, 1728, 1753, 1777, 1802, 1827, 1848, 1873, 1898, 1923, and 1947, and wherein the second PBS comprises at its 5′ end a sequence that is the reverse complement of nucleotides 13-17 of the selected sequence;
and wherein
(a) the first editing template comprises a region of complementarity to the second editing template;
(b) the first editing template comprises nucleotides 8-17 of the selected sequence for the second spacer, and the second editing template comprises nucleotides 8-17 of the selected sequence for the first spacer; or
(c) the first editing template comprises nucleotides 8-17 of the selected sequence for the second spacer, and a region of complementarity to the second editing template, and the second editing template comprises nucleotides 8-17 of the selected sequence for the first spacer, and a region of complementarity to the first editing template.

2. The prime editing composition of claim 1, wherein the selected sequence for the first spacer is SEQ ID NO: 1, 101, or 234.

3. The prime editing composition of claim 1 or 2, wherein the selected sequence for the second spacer is SEQ ID NO: 631, 1017, or 1215.

4. The prime editing composition of any one of claims 1-3, wherein the selected sequence for the first spacer is SEQ ID NO: 101.

5. The prime editing composition of any one of claims 1-4, wherein the selected sequence for the second spacer is SEQ ID NO: 1017.

6. The prime editing composition of any one of claims 1-5, wherein the first spacer and/or the second spacer is from 16 to 22 nucleotides in length.

7. The prime editing composition of any one of claims 1-6, wherein the first spacer and/or the second spacer is 20 nucleotides in length and comprises the selected sequence.

8. The prime editing composition of any one of claims 1-7, wherein the first gRNA core and the second gRNA core comprise the same sequence.

9. The prime editing composition of claim 8, wherein the first gRNA core and the second gRNA core each comprises SEQ ID NO: 2260.

10. The Prime editing composition of claim 8, wherein the first gRNA core and the second gRNA core each comprises SEQ ID NO: 2259.

11. The prime editing composition of any one of claims 1-10, wherein the first spacer, the first gRNA core, the first editing template, and the first PBS form a contiguous sequence in a single molecule.

12. The prime editing composition of claim 11, wherein the first PEgRNA comprises from 5′ to 3′ the first spacer, the first gRNA core, the first editing template, and the first PBS.

13. The prime editing composition of any one of claims 1-12, wherein the second spacer, the second gRNA core, the second editing template, and the second PBS form a contiguous sequence in a single molecule.

14. The prime editing composition of claim 13, wherein the second pegRNA comprises from 5′ to 3′ the second spacer, the second gRNA core, the second editing template, and the second PBS.

15. The prime editing composition of any one of claims 1-14, where in the first PBS is at least 8 nucleotides in length and comprises at its 5′ end a sequence that is the reverse complement of nucleotides 10-17 of the selected sequence for the first spacer.

16. The prime editing composition of claim 15, wherein the first PBS is 8-17 nucleotides in length and comprises at its 5′ end a sequence that is the reverse complement of nucleotides 10-17, 9-17, 8-17, 7-17, 6-17, 5-17, 4-17, 3-17, 2-17, or 1-17 of the selected sequence for the first spacer.

17. The prime editing composition of claim 16, wherein the first PBS is 8-16 nucleotides in length and comprises at its 5′ end a sequence that is the reverse complement of nucleotides 10-17, 9-17, 8-17, 7-17, 6-17, 5-17, 4-17, 3-17, or 2-17 of the selected sequence for the first spacer.

18. The prime editing composition of claim 16, wherein the first PBS is 10-12 nucleotides in length and comprise at its 5′ end a sequence that is the reverse complement of nucleotides 8-17, 7-17, or 6-17 of the selected sequence for the first spacer.

19. The prime editing composition of any one of claims 1-18, where in the second PBS is at least 8 nucleotides in length and comprises at its 5′ end a sequence that is the reverse complement of nucleotides 10-17 of the selected sequence for the second spacer.

20. The prime editing composition of claim 19, wherein the second PBS is 8-17 nucleotides in length and comprises at its 5′ end a sequence that is the reverse complement of nucleotides 10-17, 9-17, 8-17, 7-17, 6-17, 5-17, 4-17, 3-17, 2-17, or 1-17 of the selected sequence for the second spacer.

21. The prime editing composition of claim 20, wherein the second PBS is 8-16 nucleotides in length and comprises at its 5′ end a sequence that is the reverse complement of nucleotides 10-17, 9-17, 8-17, 7-17, 6-17, 5-17, 4-17, 3-17, or 2-17 of the selected sequence for the second spacer.

22. The prime editing composition of claim 21, wherein the second PBS is 10-12 nucleotides in length and comprise at its 5′ end a sequence that is the reverse complement of nucleotides 8-17, 7-17, or 6-17 of the selected sequence for the first spacer.

23. The prime editing composition of any one of claims 1-22, wherein:
(a) the first spacer comprises SEQ ID NO: 1, and the first PBS comprises SEQ ID NO: 12 or 14,
the first spacer comprises SEQ ID NO: 101, and the first PBS comprises SEQ ID NO: 112 or 114, or
the first spacer comprises SEQ ID NO: 234, and the first PBS comprises SEQ ID NO: 245 or 247,
and
(b) the second spacer comprises SEQ ID NO: 631, and the second PBS comprises SEQ ID NO: 642 or 644;
the second spacer comprises SEQ ID NO: 1017, and the second PBS comprises SEQ ID NO: 1028 or 1030; or
the second spacer comprises SEQ ID NO: 1215, and the second PBS comprises SEQ ID NO: 1226 or 1228.

24. The prime editing composition of any one of claims 1-23, wherein the first editing template comprises a region of complementarity to the second editing template.

25. The prime editing composition of claim 24, wherein the region of complementarity is about 15 to about 38 nucleotides in length.

26. The prime editing composition of claim 24, wherein the region of complementarity is about 18 to about 38 nucleotides in length

27. The prime editing composition of claim 25 or 26, wherein the first and/or the second editing template is about 15 to about 93 nucleotides in length.

28. The prime editing composition of any one of claims 24-27, wherein the GC content of the region of complementarity is at least about 27%.

29. The prime editing composition of claim 28, wherein the GC content of the region of complementarity is about 30% to about 85%

30. The prime editing composition of claim 28, wherein the GC content of the region of complementarity is about 40% to about 70%.

31. The prime editing composition of claim 28, wherein the GC content of the region of complementarity is about 63% to about 70%.

32. The prime editing composition of any one of claims 24-31, wherein the first editing template comprises nucleotides 1 to x of SEQ ID NO: a, wherein x is an integer from 10 to i, wherein i is the length of SEQ ID NO: a; wherein the second editing template comprises nucleotides 1 to y of SEQ ID NO: b, wherein y is an integer from (i+10−x) to i; wherein a is an integer from 1972 to 1991 or from 2401 to 2414, and wherein b is an integer that equals (a+99).

33. The prime editing composition of any one of claims 24-31, wherein the second editing template comprises nucleotides 1 to x of SEQ ID NO: a, wherein x is an integer from 10 to i, wherein i is the length of SEQ ID NO: a; wherein the first editing template comprises nucleotides 1 to y of SEQ ID NO: b, wherein y is an integer from (i+10−x) to i; wherein a is an integer from 1972 to 1991 or from 2401 to 2414, and wherein b is an integer that equals (a+99).

34. The prime editing composition of claim 38 or 39, wherein x is an integer from 15 to i.

35. The prime editing composition of claim 38 or 39, wherein x is an integer from 17 to i.

36. The prime editing composition of claim 38 or 39, wherein x is an integer from 17 to i, from 19 to i, from 20 to i, from 27 to i, from 28 to i, or from 29 to i.

37. The prime editing composition of any one of claims 32-36, wherein x equals y equals i.

38. The prime editing composition of any one of claims 32-37, wherein a is 1972.

39. The prime editing composition of any one of claims 32-37, wherein a is 1979, 1982, 1985, 1986, or 1991.

40. The prime editing composition of claim 24, wherein the first PEgRNA comprises a sequence selected from the group consisting of SEQ ID NOs: 22-25, 66-100, 122-125, 202-233, 255-258, and 299-330, and wherein the second PEgRNA comprises a sequence selected from the group consisting of SEQ ID NOs: 652-655, 708-739, 1038-1041, 1094-1131, 1236-1239, and 1292-1323.

41. The prime editing composition of claim 24, wherein the first PEgRNA comprises a sequence selected from the group consisting of SEQ ID NOs: 122-125 and 218-233, and wherein the second PEgRNA comprises a sequence selected from the group consisting of SEQ ID NOs: 652-655 and 724-739.

42. The prime editing composition of claim 24, wherein the first PEgRNA comprises a sequence selected from the group consisting of SEQ ID NOs: SEQ ID NOs: 122-125 and 218-233, and wherein the second PEgRNA comprises a sequence selected from the group consisting of SEQ ID NOs: 1038-1041, 1098, and 1101.

43. The prime editing composition of claim 24, wherein the first PEgRNA comprises a sequence selected from the group consisting of SEQ ID NOs: SEQ ID NOs: 122-125 and 218-233, and wherein the second PEgRNA comprises a sequence selected from the group consisting of SEQ ID NOs: 1236-1239 and 1308-1321.

44. The prime editing composition of claim 24, wherein the first PEgRNA comprises a sequence selected from the group consisting of SEQ ID NOs: 22-25 and 98-100, and wherein the second PEgRNA comprises a sequence selected from the group consisting of SEQ ID NOs: 652-655 and 724-739.

45. The prime editing composition of claim 24, wherein the first PEgRNA comprises a sequence selected from the group consisting of SEQ ID NOs: 22-25, and 98-100, and wherein the second PEgRNA comprises a sequence selected from the group consisting of SEQ ID NOs: 1038-1041, 1098, and 1101.

46. The prime editing composition of claim 24, wherein the first PEgRNA comprises a sequence selected from the group consisting of SEQ ID NOs: 22-25, and 98-100, and wherein the second PEgRNA comprises a sequence selected from the group consisting of SEQ ID NOs: 1236-1239 and 1308-1321.

47. The prime editing composition of claim 24, wherein the first PEgRNA comprises a sequence selected from the group consisting of SEQ ID NOs: 255-258, and 315-330, and wherein the second PEgRNA comprises a sequence selected from the group consisting of SEQ ID NOs: 652-655 and 724-739.

48. The prime editing composition of claim 24, wherein the first PEgRNA comprises a sequence selected from the group consisting of SEQ ID NOs: 255-258, and 315-330, and wherein the second PEgRNA comprises a sequence selected from the group consisting of SEQ ID NOs: 1038-1041, 1098, and 1101.

49. The prime editing composition of claim 24, wherein the first PEgRNA comprises a sequence selected from the group consisting of SEQ ID NOs: 255-258, and 315-330, and wherein the second PEgRNA comprises a sequence selected from the group consisting of SEQ ID NOs: 1236-1239 and 1308-1321.

50. The prime editing composition of any one of claims 1-23, wherein the first editing template comprises at its 3′ end nucleotides 8-17 of the selected sequence for the second spacer, and wherein the second editing template comprises at its 3′ end nucleotides 8-17 of the selected sequence of the first spacer.

51. The prime editing composition of claim 50, wherein the first editing template comprises at its 3′ end nucleotides 1-17, 2-17, 3-17, 4-17, 5-17, 6-17, 7-17, or 8-17 of the selected sequence for the second spacer, and/or wherein the second editing template comprises at its 3′ end nucleotides 1-17, 2-17, 3-17, 4-17, 5-17, 6-17, 7-17, or 8-17 of the selected sequence for the first spacer.

52. The prime editing composition of claim 50, wherein the first editing template comprises at its 3′ end nucleotides 3-17 of the selected sequence for the second spacer, and wherein the second editing template comprises at its 3′ end nucleotides 3-17 of the selected sequence of the first spacer.

53. The prime editing composition of claim 52, wherein the first editing template comprises a region of complementarity to a sequence on the second strand of the FXN gene that is directly downstream of nucleotide 3 of the second search target sequence, wherein the region of complementarity is about 20 to 30 nucleotides in length.

54. The prime editing composition of claim 53, wherein the region of complementarity is about 20, about 25, or about 30 nucleotides in length.

55. The prime editing composition of any one of claims 52-54, wherein the second editing template comprises a region of complementarity to a sequence on the first strand of the FXN gene that is directly downstream to nucleotide 3 of the first search target sequence, wherein the region of complementarity is about 20 to 30 nucleotides in length.

56. The prime editing composition of claim 55, wherein the region of complementarity is about 20, about 25, or about 30 nucleotides in length.

57. The prime editing composition of any one of claims 50-56, wherein the first editing template comprises a sequence selected from the group consisting of SEQ ID NOs: 2170-2172, wherein the selected sequence for the second spacer is SEQ ID NO: 631, optionally wherein the second spacer comprises at its 3′ end SEQ ID NO: 631.

58. The prime editing composition of any one of claims 50-56, wherein the first editing template comprises a sequence selected from the group consisting of SEQ ID NOs: 2173-2175, wherein the selected sequence for the second spacer is SEQ ID NO: 1017, optionally wherein the second spacer comprises at its 3′ end SEQ ID NO: 1017.

59. The prime editing composition of any one of claims 50-56, wherein the first editing template comprises a sequence selected from the group consisting of SEQ ID NOs: 2176-2178, wherein the selected sequence for the second spacer is SEQ ID NO: 1215, optionally wherein the second spacer comprises at its 3′ end SEQ ID NO: 1215.

60. The prime editing composition of any one of claims 50-59, wherein the second editing template comprises a sequence selected from the group consisting of SEQ ID NOs: 2179-2181, wherein the first spacer comprises at its 3′ end nucleotides 5-20 of SEQ ID NO: 101, optionally wherein the first spacer comprises at its 3′ end SEQ ID NO: 101.

61. The prime editing composition of any one of claims 50-56, wherein the first PEgRNA comprises a sequence selected from the group consisting of SEQ ID NOs: 166-177, and wherein the second PEgRNA comprises a sequence selected from the group consisting of SEQ ID NOs: 696-707.

62. The prime editing composition of any one of claims 50-56, wherein the first PEgRNA comprises a sequence selected from the group consisting of SEQ ID NOs: 178-189, and wherein the second PEgRNA comprises a sequence selected from the group consisting of SEQ ID NOs: 1082-1093.

63. The prime editing composition of any one of claims 50-56, wherein the first PEgRNA comprises a sequence selected from the group consisting of SEQ ID NOs: 190-201, and wherein the second PEgRNA comprises a sequence selected from the group consisting of SEQ ID NOs: 1280-1291.

64. The prime editing composition of any one of claims 1-23, wherein the first editing template comprises from 5′ to 3′ (i) a region of complementarity to the second editing template and (ii) nucleotides 8-17 of the selected sequence for the second spacer; and wherein the second editing template comprises from 5′ to 3′ (i) a region of complementarity to the first editing template and (ii) nucleotides 8-17 of the selected sequence for the first spacer.

65. The prime editing composition of claim 64, wherein the first editing template comprises nucleotides 1-17, 2-17, 3-17, 4-17, 5-17, 6-17, 7-17, or 8-17 of the selected sequence for the second spacer, and/or wherein the second editing template comprises 1-17, 2-17, 3-17, 4-17, 5-17, 6-17, 7-17, or 8-17 of the selected sequence for the first spacer.

66. The prime editing composition of claim 64, wherein the first editing template comprises nucleotides 3-17 of the selected sequence for the second spacer, and wherein the second editing template comprises nucleotides 3-17 of the selected sequence of the first spacer.

67. The prime editing composition of claim 64, wherein the first editing template comprises a region of complementarity to a sequence on the second strand of the FXN gene that is directly downstream to nucleotide 3 of the second search target sequence, wherein the region of complementarity is about 20 to 30 nucleotides in length.

68. The prime editing composition of any one of claims 64-67, wherein the second editing template comprises a region of complementarity to a sequence on the first strand of the FXN gene that is directly downstream to nucleotide 3 of the first search target sequence, wherein the region of complementarity is about 20 to 30 nucleotides in length.

69. The prime editing composition of any one of claims 64-68, wherein the region of complementarity between the first editing template and the second editing template is about 15 to about 38 nucleotides in length.

70. The prime editing composition of any one of claims 64-68, wherein the region of complementarity between the first editing template and the second editing template is about 15 to about 93 nucleotides in length.

71. The prime editing composition of any one of claims 1-39, 50-61, and 64-70, wherein the first PEgRNA and/or the second PEgRNA further comprises a 3′ motif, optionally wherein the 3′ motif is connected to the 3′ end of the PEgRNA via a linker.

72. The prime editing composition of claim 71, wherein the 3′ motif comprises the sequence of SEQ ID NO: 2237.

73. The prime editing composition of any one of claims 1-72, wherein the first PEgRNA and/or the second PEgRNA further comprises 5′mN*mN*mN* and 3′ mN*mN*mN*N modifications, where m indicates that the nucleotide contains a 2′-O-Me modification and a * indicates the presence of a phosphorothioate bond.

74. The prime editing composition of any one of claims 1-73, further comprising a prime editor or one or more polynucleotides encoding the prime editor, wherein the prime editor comprises (i) a Cas9 nickase having a nuclease inactivating mutation in the HNH domain and (ii) a reverse transcriptase.

75. The prime editing composition of claim 74, wherein the Cas9 nickase comprises an amino acid sequence having at least 80%, 85%, 90%, 95%, 96%, 97%, 98%, 99%, or 100% identity to SEQ ID NO: 2288.

76. The prime editing composition of claim 74 or 75, wherein the reverse transcriptase comprises an amino acid sequence having at least 80%, 85%, 90%, 95%, 96%, 97%, 98%, 99%, or 100% identity to SEQ ID NO: 2283.

77. The prime editing composition of claim 75 or 76, wherein the sequence identities are determined by Needleman-Wunsch alignment of two protein sequences with Gap Costs set to Existence: 11 Extension: 1 where percent identity is calculated by dividing the number of identities by the length of the alignment.

78. The prime editing composition of any one of claims 75-77, wherein the prime editor is a fusion protein.

79. The prime editing composition of claim 78, wherein the fusion protein comprises SEQ ID NO: 2343 or 2344.

80. The prime editing composition of any one of claims 74-79, wherein the one or more polynucleotides comprise (a) a first sequence encoding an N-terminal portion of the Cas9 nickase and an intein-N and (b) a second sequence encoding an intein-C, a C-terminal portion of the Cas9 nickase, and the reverse transcriptase.

81. The prime editing composition of any one of claims 74-80, comprising one or more vectors that comprises the one or more polynucleotides encoding the first PEgRNA, the one or more polynucleotides encoding the second PEgRNA, and the one or more polynucleotides encoding the prime editor.

82. The prime editing composition of claim 81, wherein the one or more vectors are AAV vectors.

83. An LNP comprising the prime editing composition of any one of claims 1-80.

84. A pharmaceutical composition comprising the prime editing composition of any one of claims 1-82 or the LNP of claim 83 and a pharmaceutically acceptable excipient.

85. A method of editing a FXN gene, the method comprising contacting the FXN gene with (a) the prime editing composition of any one of claims 1-73 and a prime editor comprising a Cas9 nickase having a nuclease inactivation mutation in the HNH domain and a reverse transcriptase, (b) the prime editing composition of any one of claims 74-82, or (c) the LNP of claim 83.

86. The method of claim 85, wherein the FXN gene is in a cell.

87. The method of claim 86, wherein the cell is a mammalian cell.

88. The method of claim 86, wherein the cell is a human cell.

89. The method of any one of claims 86-88, wherein the cell is a fibroblast, a myoblast, a neural stem cell, a neural progenitor cell, a neuron, a dorsal root ganglion cell, a cardiac progenitor cell, a cardiomyocyte, a retinal progenitor cell, or a retinal ganglion neuron.

90. The method of any one of claims 86-89, wherein the cell is in a subject.

91. The method of claim 90, wherein the subject is a human.

92. The method of any one of claims 86-91, wherein the cell is from a subject having Friedreich's Ataxia.

93. A cell generated by the method of any one of claims 86-92.

94. A population of cells generated by the method of any one of claims 86-92.

95. A method of treating Friedreich's Ataxia in a subject in need thereof, the method comprising administering to the subject the pharmaceutical composition of claim 84.
